(19) United States
(12) Patent Application Publication
(10) Pub. No.: US 2021/0071158 A1
(43) Pub. Date: Mar. 11, 2021

(54) NOVEL TYPE VI CRISPR ORTHOLOGS AND SYSTEMS

(71) Applicants: THE BROAD INSTITUTE, INC., Cambridge, MA (US); MASSACHUSETTS INSTITUTE OF TECHNOLOGY, Cambridge, MA (US)

(72) Inventors: Feng Zhang, Cambridge, MA (US); David Benjamin Turitz Cox, Cambridge, MA (US)

(73) Assignees: THE BROAD INSTITUTE, INC., Cambridge, MA (US); MASSACHUSETTS INSTITUTE OF TECHNOLOGY, Cambridge, MA (US)

(21) Appl. No.: 16/604,724

(22) PCT Filed: Apr. 11, 2018
(86) PCT No.: PCT/US2018/027125

§ 371 Date: Oct. 11, 2019

Related U.S. Application Data
(60) Provisional application No. 62/484,791, filed on Apr. 12, 2017.
(60) Provisional application No. 62/561,662, filed on Sep. 21, 2017.
(60) Provisional application No. 62/568,129, filed on Oct. 4, 2017.

(51) Int. Cl. C12N 9/22; C12N 15/11; C12Q 1/6823

(52) U.S. Cl. CPC C12N 9/22; C12N 2310/20; C12Q 1/6823; C12N 15/11

(57) ABSTRACT

The invention provides for systems, methods, and compositions for targeting nucleic acids. In particular, the invention provides non-naturally occurring or engineered RNA-targeting systems comprising a novel RNA-targeting CRISPR effector protein and at least one targeting nucleic acid component like a guide RNA.

### RELATED APPLICATIONS AND INCORPORATION BY REFERENCE

[0001] This application is a U.S. national stage application based on International Application No. PCT/US2018/027125 filed Apr. 11, 2018, which claims priority to U.S. Provisional Application No. 62/484,791 filed Apr. 12, 2017, U.S. Provisional Application No. 62/561,662 filed Sep. 21, 2017, and U.S. Provisional Application No. 62/568,129 filed Oct. 4, 2017, each of which is incorporated herein by reference in its entirety.

### STATEMENT AS TO FEDERALLY SPONSORED RESEARCH

[0002] This invention was made with government support under grant numbers MH100706 and MH110049 awarded by the National Institutes of Health. The government has certain rights in the invention.

### SEQUENCE LISTING

[0003] The substitute electronic sequence listing (“BROD-4770US_ST25.txt;” Size is 1,177,921 bytes and it was created on Aug. 31, 2020) is herein incorporated by reference in its entirety and replaces any all previously submitted Sequence Listings.

[0004] Reference is made to PCT application including as it designates the US, inter alia, application No. PCT/US2016/058302, filed Oct. 21, 2016. Reference is made to U.S. provisional patent application 62/245,270 filed on Oct. 22, 2015, U.S. provisional patent application 62/296,548 filed on Feb. 17, 2016, and U.S. provisional patent applications 62/376,367 and 62/376,382, filed on Aug. 17, 2016. Reference is further made to U.S. 62/471,792, filed Mar. 15, 2017. Reference is further made to U.S. provisional patent application 62/471,170, filed Mar. 17, 2017. Reference is further made to U.S. provisional patent application 62/484,791, filed Apr. 12, 2017. Reference is further made to U.S. provisional patent application 62/561,662, filed Sep. 21, 2017. Mention is made of: Smargon et al. (2017), “Cas13b Is a Type VI-B CRISPR-Associated RNA-Guided RNase Differentially Regulated by Accessory Proteins Csx27 and Csx28,” Molecular Cell 65, 618-630 (Feb. 16, 2017) doi: 10.1016/j.molce1.2016.12.023. Epub Jan. 5, 2017 and Smargon et al. (2017), “Cas13b Is a Type VI-B CRISPR-Associated RNA-Guided RNase Differentially Regulated by Accessory Proteins Csx27 and Csx28,” bioRxiv 092577; doi: https://doi.org/10.1101/092577. Posted Dec. 9, 2017. Each of the foregoing applications and literature citations are hereby incorporated herein by reference.

[0005] All documents cited or referenced in herein cited documents, together with any manufacturer's instructions, descriptions, product specifications, and product sheets for any products mentioned herein or in any document incorporated by reference herein, are hereby incorporated herein by reference, and may be employed in the practice of the invention. More specifically, all referenced documents are incorporated by reference to the same extent as if each individual document was specifically and individually indicated to be incorporated by reference.

### FIELD OF THE INVENTION

[0006] The present invention generally relates to systems, methods and compositions used for the control of gene expression involving sequence targeting, such as perturbation of gene transcripts or nucleic acid editing, that may use vector systems related to Clustered Regularly Interspaced Short Palindromic Repeats (CRISPR) and components thereof.

### BACKGROUND OF THE INVENTION

[0007] Recent advances in genome sequencing techniques and analysis methods have significantly accelerated the ability to catalog and map genetic factors associated with a diverse range of biological functions and diseases. Precise genome targeting technologies are needed to enable systematic reverse engineering of causal genetic variations by allowing selective perturbation of individual genetic elements, as well as to advance synthetic biology, biotechnological, and medical applications. Although genome-editing techniques such as designer zinc fingers, transcription activator-like effectors (TALEs), or homing meganucleases are available for producing targeted genome perturbations, there remains a need for new genome and transcriptome engineering technologies that employ novel strategies and molecular mechanisms and are affordable, easy to set up, scalable, and amenable to targeting multiple positions within the eukaryotic genome and transcriptome. This would provide a major resource for new applications in genome engineering and biotechnology.

[0008] The CRISPR-Cas systems of bacterial and archaeal adaptive immunity show extreme diversity of protein composition and genomic loci architecture. The CRISPR-Cas system loci has more than 50 gene families and there is no strictly universal genes indicating fast evolution and extreme diversity of loci architecture. So far, adopting a multi-pronged approach, there is comprehensive cas gene identification of about 395 profiles for 93 Cas proteins. Classification includes signature gene profiles plus signatures of locus architecture. A new classification of CRISPR-Cas systems is proposed in which these systems are broadly divided into two classes, Class 1 with multisubunit effector complexes and Class 2 with single-subunit effector modules exemplified by the Cas9 protein. Novel effector proteins associated with Class 2 CRISPR-Cas systems may be developed as powerful genome engineering tools and the prediction of putative novel effector proteins and their engineering and optimization is important.

[0009] The CRISPR-Cas adaptive immune system defends microbes against foreign genetic elements via DNA or RNA-DNA interference. Class 2 type VI single-component CRISPR-Cas effectors target RNA. One such is Cas13a (also known as C2c2; see Shmakov et al. (2015) “Discovery and Functional Characterization of Diverse Class 2 CRISPR-Cas Systems”; Molecular Cell 60:1-13; doi: http://dx.doi.org/10.1016/j.molce1.2015.10.008), which was characterized as an RNA-guided Rnase (Abudayyeh et al. (2016), Science, [Epub ahead of print], June 2; “C2c2 is a single-component programmable RNA-guided RNA-targeting CRISPR effector”; doi: 10.1126/science.aaf5573). Under current classification, Cas13a is a Class 2 type VI-A CRISPR-Cas system. An alternative is provided by Cas13b, a Class 2 Type VI-B effector protein. Class 2 Type VI-B effector proteins include two subgroups, Type VI-B1 and Type VI-B2, which are also referred to as Group 29 proteins and Group 30 proteins, and include members which are RNA-programmable nucleases, RNA-interfering and may be involved in bacterial adoptive immunity against RNA phages. (see Smargon A et al. “Cas13b is a Type VI-B CRISPR-associated RNA-Guided RNAse differentially regulated by accessory proteins Csx27 and Csx28”, Molecular Cell, online Jan. 5, 2017. DOI: 10.1016/j.molce1.2016.12.023).

[0010] Group 29 and group 30 systems comprise a large single effector (approximately 1100 amino acids in length), termed Cas13b, and one or none of two small putative accessory proteins (approximately 200 amino acids in length, and termed Csx27 and Csx28) nearby a CRISPR array. Based on the nearby small protein, the system is classified as Type VI-B 1 (Csx27) or Type VI-B2 (Csx28). No additional proteins out to 25 kilobase pairs upstream or downstream from the array are conserved across species with each locus. With minor exceptions, the CRISPR array comprises direct repeat sequences 36 nucleotides in length and spacer sequences 30 nucleotides in length. The direct repeat is generally well conserved, especially at the ends, with a GTTG/GUUG at the 5′ end reverse complementary to a CAAC at the 3′ end. This conservation suggests strong base pairing for an RNA loop structure that potentially interacts with the protein(s) in the locus. A motif search complementary to the direct repeats revealed no candidate tracrRNAs nearby the arrays, indicative of a single crRNA like that found in the Cpf1 locus.

[0011] Citation or identification of any document in this application is not an admission that such document is available as prior art to the present invention.

### SUMMARY OF THE INVENTION

[0012] There exists a pressing need for alternative and robust systems and techniques for targeting nucleic acids or polynucleotides (e.g. DNA or RNA or any hybrid or derivative thereof) with a wide array of applications, in particular in eukaryotic systems, more in particular in mammalian systems. This invention addresses this need and provides related advantages. Adding the novel RNA-targeting systems of the present application to the repertoire of genomic, transcriptomic, and epigenomic targeting technologies may transform the study and perturbation or editing of specific target sites through direct detection, analysis and manipulation, in particular in eukaryotic systems, more in particular in mammalian systems (including cells, organs, tissues, or organisms). To utilize the RNA-targeting systems of the present application effectively for RNA targeting without deleterious effects, it is critical to understand aspects of engineering and optimization of these RNA targeting tools.

[0013] The Class 2 type VI-B effector protein Cas13b is a RNA-guided RNase that can be efficiently programmed to degrade ssRNA. The present inventors have undertaken screening to identify a representative number of Cas13b orthologs from different species, and to determine efficacy of those orthologs in eukaryotic cellular environments. In various embodiments, the invention refers to, includes, or makes use of a Type VI-B CRISPR-Cas effector protein, or a Cas13b effector protein; as well as to nucleic acids encoding such proteins.

[0014] In some embodiments, the effector protein is at least 50%, 60%, 70%, 80%, 85%, 90%, 91%, 92%, 93%, 94%, 95%, 96%, 97%, 98%, 99% or more homologous or identical to a wild type Cas13b effector protein of a prokaryotic organism selected from the group consisting of Porphyromonas, Prevotella, Bacteroides, Riemerella, Bergeyella, Alistipes, Myroides, Capnocytophaga, and Flavobacterium. In some embodiments, the effector protein is at least 50%, 60%, 70%, 80%, 85%, 90%, 91%, 92%, 93%, 94%, 95%, 96%, 97%, 98%, 99% or more homologous or identical to a wild type Cas13b effector protein of a prokaryotic organism selected from the group consisting of Porphyromonas gulae, Prevotella sp., Porphyromonas gingivalis, Bacteroides pyogenes, Riemerella anatipestifer, Bergeyella zoohelcum, Prevotella intermedia, Prevotella buccae, Alistipes sp., Prevotella aurantiaca, Myroides odoratimimus, Capnocytophaga canimorsus, Flavobacterium branchiophilum, and Flavobacterium columnare. In preferred embodiments, the effector protein is at least 50%, 60%, 70%, 80%, 85%, 90%, 91%, 92%, 93%, 94%, 95%, 96%, 97%, 98%, 99% or more homologous or identical to a wild type Cas13b effector protein selected from the group consisting of Porphyromonas gulae Cas13b (accession number WP_039434803), Prevotella sp. P5-125 Cas13b (accession number WP_044065294), Porphyromonas gingivalis Cas13b (accession number WP_053444417), Porphyromonas sp. COT-052 OH4946 Cas13b (accession number WP_039428968), Bacteroides pyogenes Cas13b (accession number WP_034542281), Riemerella anatipestifer Cas13b (accession number WP_004919755). The most preferred effector proteins are those at least 50%, 60%, 70%, 80%, 85%, 90%, 91%, 92%, 93%, 94%, 95%, 96%, 97%, 98%, 99% or more homologous or identical to a wild type Cas13b effector protein selected from the group consisting of Porphyromonas gulae Cas13b (accession number WP_039434803), Prevotella sp. P5-125 Cas13b (accession number WP_044065294), Porphyromonas gingivalis Cas13b (accession number WP_053444417), Porphyromonas sp. COT-052 OH4946 Cas13b (accession number WP_039428968); and most specifically preferred are Porphyromonas gulae Cas13b (accession number WP_039434803) or Prevotella sp. P5-125 Cas13b (accession number WP_044065294). The full amino acid sequences of each of these Cas13b effector proteins, and others, is given in FIG. 1.

[0015] In some embodiments, the Cas13b effector protein (a) comprises 900-1800 amino acids and two HEPN domains, (b) is naturally present in a prokaryotic genome within 10 kb upstream or downstream of a CRISPR array, (c) is the only encoded protein comprising more than 700 amino acids within 10 kb upstream or downstream of the CRISPR array, and/or (d) there is no Cas1 gene or Cas2 gene within 10 kb upstream or downstream of the CRISPR array. In some embodiments, at least one of Csx27 or Csx28 is also present within 10 kb upstream or downstream of the CRISPR array.

[0016] In certain embodiments, the Cas13b effector protein has a modified sequence when compared to a wild-type protein. In certain embodiments, the effector protein is identical to a wild type Cas13b effector protein in at least one or more common motifs shared among two or more Cas13b effector proteins. Common motifs may be determined by standard sequence alignment tools to identify consensus sequences. In particular embodiments, the Cas13b effector protein is a protein comprising a sequence having at least 70% sequence identity with one or more of the sequences consisting of DKHXFGAFLNLARHN (SEQ ID NO:1), GLLFFVSLFLDK (SEQ ID NO:2), SKIXGFK (SEQ ID NO:3), DMLNELXRCP (SEQ ID NO:4), RXZDRFPYFALRYXD (SEQ ID NO: 5) and LRFQVBLGXY (SEQ ID NO:6). In further particular embodiments, the Cas13b effector protein comprises a sequence having at least 70% sequence identity at least 2, 3, 4, 5 or all 6 of these sequences. In further particular embodiments, the sequence identity with these sequences is at least 75%, 80%, 85%, 90%, 95% or 100%. In further particular embodiments, the Cas 13b effector protein is a protein comprising a sequence having 100% sequence identity with GLLFFVSLFL (SEQ ID NO:7) and RHQXRFPYF (SEQ ID NO:8). In further particular embodiments, the Cas13b effector is a Cas13b effector protein comprising a sequence having 100% sequence identity with RHQDRFPY (SEQ ID NO:9).

[0017] It will be appreciated that the terms Cas enzyme, CRISPR enzyme, CRISPR protein Cas protein and CRISPR Cas are generally used interchangeably and at all points of reference herein refer by analogy to CRISPR effector proteins further described in this application, unless otherwise apparent, such as by specific reference to Cas9.

[0018] In embodiments of the invention, a Type VI-B system comprises a Cas13b effector protein and optionally a small accessory protein encoded upstream or downstream of the Cas13b effector protein. In certain embodiments, the small accessory protein enhances the Cas13b effector's ability to target RNA.

[0019] In certain embodiments of the invention, a Type VI-B system comprises a Cas13b effector protein and optionally a small accessory protein encoded upstream or downstream of the Cas13b effector protein. In certain embodiments, the small accessory protein represses the Cas13b effector's ability to target RNA.

[0020] The invention provides a non-naturally occurring or engineered composition comprising i) a Type VI-B CRISPR-Cas effector protein, and ii) a Type VI-B CRISPR-Cas crRNA, wherein the crRNA comprises a) a guide sequence that is capable of hybridizing to a target RNA sequence, and b) a direct repeat sequence. The Type VI-B CRISPR-Cas effector protein forms a complex with the crRNA, and the guide sequence directs sequence-specific binding of the complex to the target RNA sequence, whereby there is formed a CRISPR complex comprising the Type VI-B CRISPR-Cas effector protein complexed with the guide sequence that is hybridized to the target RNA sequence. The complex that is formed when the guide sequence hybridizes to the target RNA sequence includes interaction (recognition) of the protospacer flanking sequence (PFS).

[0021] In some embodiments, a non-naturally occurring or engineered composition of the invention may comprise a Type VI-B CRISPR-Cas accessory protein that enhances Type VI-B CRISPR-Cas effector protein activity. In certain such embodiments, the accessory protein that enhances Type VI-B CRISPR-Cas effector protein activity is a csx28 protein. In such embodiments, the Type VI-B CRISPR-Cas effector protein and the Type VI-B CRISPR-Cas accessory protein may be from the same source or from a different source.

[0022] In some embodiments, a non-naturally occurring or engineered composition of the invention comprises a Type VI-B CRISPR-Cas accessory protein that represses Type VI-B CRISPR-Cas effector protein activity. In certain such embodiment, the accessory protein that represses Type VI-B CRISPR-Cas effector protein activity is a csx27 protein. In such embodiments, the Type VI-B CRISPR-Cas effector protein and the Type VI-B CRISPR-Cas accessory protein may be from the same source or from a different source.

[0023] In some embodiments, a non-naturally occurring or engineered composition of the invention comprises two or more Type VI-B CRISPR-Cas crRNAs.

[0024] In some embodiments, a non-naturally occurring or engineered composition of the invention comprises a guide sequence that hybridizes to a target RNA sequence in a prokaryotic cell. In some embodiments, a non-naturally occurring or engineered composition of the invention comprises a guide sequence that hybridizes to a target RNA sequence in a eukaryotic cell. The CRISPR system as provided herein can make use of a crRNA or analogous polynucleotide comprising a guide sequence, wherein the polynucleotide is an RNA, a DNA or a mixture of RNA and DNA, and/or wherein the polynucleotide comprises one or more nucleotide analogs. The sequence can comprise any structure, including but not limited to a structure of a native crRNA, such as a bulge, a hairpin or a stem loop structure. In certain embodiments, the polynucleotide comprising the guide sequence forms a duplex with a second polynucleotide sequence which can be an RNA or a DNA sequence.

[0025] In certain embodiments, the methods make use of chemically modified guide RNAs. Examples of guide RNA chemical modifications include, without limitation, incorporation of 2′-O-methyl (M), 2′-O-methyl 3′phosphorothioate (MS), or 2′-O-methyl 3′thioPACE (MSP) at one or more terminal nucleotides. Such chemically modified guide RNAs can comprise increased stability and increased activity as compared to unmodified guide RNAs, though on-target vs. off-target specificity is not predictable. (See, Hendel, 2015, Nat Biotechnol. 33(9):985-9, doi: 10.1038/nbt.3290, published online 29 Jun. 2015). Chemically modified guide RNAs further include, without limitation, RNAs with phosphorothioate linkages and locked nucleic acid (LNA) nucleotides comprising a methylene bridge between the 2′ and 4′ carbons of the ribose ring.

[0026] In some embodiments, the Type VI-B CRISPR-Cas effector protein comprises one or more nuclear localization signals (NLSs).

[0027] Cas13b achieves RNA cleavage through conserved basic residues within its two HEPN domains, in contrast to the catalytic mechanisms of other known RNases found in CRISPR-Cas systems. Mutation of the HEPN domain, such as (e.g. alanine) substitution of any of the four predicted HEPN domain catalytic residues can convert Cas13b into an inactive programmable RNA-binding protein (dCas13b, analogous to dCas9).

[0028] The ability of dCas13b to bind to specified sequences could be used in several aspects according to the invention to (i) bring effector modules to specific transcripts to modulate the function or translation, which could be used for large-scale screening, construction of synthetic regulatory circuits and other purposes; (ii) fluorescently tag specific RNAs to visualize their trafficking and/or localization; (iii) alter RNA localization through domains with affinity for specific subcellular compartments; and (iv) capture specific transcripts (through direct pull down of dCas13b or use of dCas13b to localize biotin ligase activity to specific transcripts) to enrich for proximal molecular partners, including RNAs and proteins.

[0029] Active Cas13b should also have many applications. An aspect of the invention involves targeting a specific transcript for destruction. In addition, Cas13b, once primed by the cognate target, can cleave other (non-complementary) RNA molecules in vitro and can inhibit cell growth in vivo, Biologically, this promiscuous RNase activity may reflect a programmed cell death/dormancy (PCD/D)-based protection mechanism of the type VI-B CRISPR-Cas systems. Accordingly, in an aspect of the invention, it might be used to trigger PCD or dormancy in specific cells—for example, cancer cells expressing a particular transcript, neurons of a given class, cells infected by a specific pathogen, or other aberrant cells or cells the presence of which is otherwise undesirable.

[0030] The invention provides a method of modifying nucleic acid sequences associated with or at a target locus of interest, in particular in eukaryotic cells, tissues, organs, or organisms, more in particular in mammalian cells, tissues, organs, or organisms, the method comprising delivering to said locus a non-naturally occurring or engineered composition comprising a Type VI-B CRISPR-Cas loci effector protein and one or more nucleic acid components, wherein the effector protein forms a complex with the one or more nucleic acid components and upon binding of the said complex to the locus of interest the effector protein induces the modification of the sequences associated with or at the target locus of interest. In a preferred embodiment, the modification is the introduction of a strand break. In a preferred embodiment, the sequences associated with or at the target locus of interest comprise RNA and the effector protein is encoded by a type VI-B CRISPR-Cas locus. The complex can be formed in vitro or ex vivo and introduced into a cell or contacted with RNA; or can be formed in vivo.

[0031] The invention provides a method of targeting (such as modifying) sequences associated with or at a target locus of interest, the method comprising delivering to said sequences associated with or at the locus a non-naturally occurring or engineered composition comprising a Cas13b loci effector protein (which may be catalytically active, or alternatively catalytically inactive) and one or more nucleic acid components, wherein the Cas13b effector protein forms a complex with the one or more nucleic acid components and upon binding of the said complex to the locus of interest the effector protein induces the modification of sequences associated with or at the target locus of interest. In a preferred embodiment, the modification is the introduction of a strand break. In a preferred embodiment the Cas13b effector protein forms a complex with one nucleic acid component; advantageously an engineered or non-naturally occurring nucleic acid component. The complex can be formed in vitro or ex vivo and introduced into a cell or contacted with RNA; or can be formed in vivo. The induction of modification of sequences associated with or at the target locus of interest can be Cas13b effector protein-nucleic acid guided. In a preferred embodiment the one nucleic acid component is a CRISPR RNA (crRNA). In a preferred embodiment the one nucleic acid component is a mature crRNA or guide RNA, wherein the mature crRNA or guide RNA comprises a spacer sequence (or guide sequence) and a direct repeat sequence or derivatives thereof. In a preferred embodiment the spacer sequence or the derivative thereof comprises a seed sequence, wherein the seed sequence is critical for recognition and/or hybridization to the sequence at the target locus.

[0032] Aspects of the invention relate to Cas13b effector protein complexes having one or more non-naturally occurring or engineered or modified or optimized nucleic acid components. In a preferred embodiment the nucleic acid component of the complex may comprise a guide sequence linked to a direct repeat sequence, wherein the direct repeat sequence comprises one or more stem loops or optimized secondary structures. In one embodiment, the direct repeat sequence may be about 36 nucleotides in length. In a specific embodiment, the direct repeat comprises a GTTG/GUUG at the 5′ end that is reverse complementary to a CAAC at the 3′ end. In certain embodiments, the direct repeat has a minimum length of 16 nts, such as at least 28 nt, and a single stem loop. In further embodiments the direct repeat has a length longer than 16 nts, preferably more than 17 nts, such as at least 28 nt, and has more than one stem loop or optimized secondary structures. In particular embodiments, the direct repeat has 25 or more nts, such as 26 nt, 27 nt, 28 nt or more, and one or more stem loop structures. In a preferred embodiment the direct repeat may be modified to comprise one or more protein-binding RNA aptamers. In a preferred embodiment, one or more aptamers may be included such as part of optimized secondary structure. Such aptamers may be capable of binding a bacteriophage coat protein. The bacteriophage coat protein may be selected from the group comprising Qβ, F2, GA, fr, JP501, MS2, M12, R17, BZ13, JP34, JP500, KU1, M11, MX1, TW18, VK, SP, FI, ID2, NL95, TW19, AP205, ϕCb5, ϕCb8r, ϕCb 12r, ϕCb23r, 7s and PRR1. In a preferred embodiment the bacteriophage coat protein is MS2. The invention also provides for the nucleic acid component of the complex being 30 or more, 40 or more or 50 or more nucleotides in length.

[0033] The invention provides cells comprising Cas13b effector protein and/or guides and or complexes thereof with target nucleic acids, including cells comprising transiently expressed or introduced Cas13b effector protein and/or guides and or complexes thereof. In certain embodiments, the cell is a eukaryotic cell, including but not limited to a yeast cell, a plant cell, a mammalian cell, an animal cell, or a human cell.

[0034] The invention also provides a method of modifying a target locus of interest, in particular in eukaryotic cells, tissues, organs, or organisms, more in particular in mammalian cells, tissues, organs, or organisms, the method comprising delivering to said locus a non-naturally occurring or engineered composition comprising a Cas13b loci effector protein and one or more nucleic acid components, wherein the Cas13b effector protein forms a complex with the one or more nucleic acid components and upon binding of the said complex to the locus of interest the effector protein induces the modification of the target locus of interest. In a preferred embodiment, the modification is the introduction of a strand break. The complex can be formed in vitro or ex vivo and introduced into a cell or contacted with RNA; or can be formed in vivo.

[0035] In such methods the target locus of interest may be comprised within an RNA molecule. Also, the target locus of interest may be comprised within a DNA molecule, and in certain embodiments, within a transcribed DNA molecule. In such methods the target locus of interest may be comprised in a nucleic acid molecule in vitro.

[0036] In such methods the target locus of interest may be comprised in a nucleic acid molecule within a cell, in particular a eukaryotic cell, such as a mammalian cell or a plant cell. The mammalian cell many be a non-human primate, bovine, porcine, rodent or mouse cell. The cell may be a non-mammalian eukaryotic cell such as poultry, fish or shrimp. The plant cell may be of a crop plant such as cassava, corn, sorghum, wheat, or rice. The plant cell may also be of an algae, tree or vegetable. The modification introduced to the cell by the present invention may be such that the cell and progeny of the cell are altered for improved production of biologic products such as an antibody, starch, alcohol or other desired cellular output. The modification introduced to the cell by the present invention may be such that the cell and progeny of the cell include an alteration that changes the biologic product produced.

[0037] The mammalian cell may be a non-human mammal, e.g., primate, bovine, ovine, porcine, canine, rodent, Leporidae such as monkey, cow, sheep, pig, dog, rabbit, rat or mouse cell. The cell may be a non-mammalian eukaryotic cell such as poultry bird (e.g., chicken), vertebrate fish (e.g., salmon) or shellfish (e.g., oyster, clam, lobster, shrimp) cell. The cell may also be a plant cell. The plant cell may be of a monocot or dicot or of a crop or grain plant such as cassava, corn, sorghum, soybean, wheat, oat or rice. The plant cell may also be of an algae, tree or production plant, fruit or vegetable (e.g., trees such as citrus trees, e.g., orange, grapefruit or lemon trees; peach or nectarine trees; apple or pear trees; nut trees such as almond or walnut or pistachio trees; nightshade plants; plants of the genus Brassica; plants of the genus Lactuca; plants of the genus Spinacia; plants of the genus Capsicum; cotton, tobacco, asparagus, carrot, cabbage, broccoli, cauliflower, tomato, eggplant, pepper, lettuce, spinach, strawberry, blueberry, raspberry, blackberry, grape, coffee, cocoa, etc).

[0038] The invention provides a method of modifying a target locus of interest, the method comprising delivering to said locus a non-naturally occurring or engineered composition comprising a Type VI-B CRISPR-Cas loci effector protein and one or more nucleic acid components, wherein the effector protein forms a complex with the one or more nucleic acid components and upon binding of the said complex to the locus of interest the effector protein induces the modification of the target locus of interest. In a preferred embodiment, the modification is the introduction of a strand break.

[0039] The invention also provides a method of modifying a target locus of interest, the method comprising delivering to said locus a non-naturally occurring or engineered composition comprising a Cas13b loci effector protein and one or more nucleic acid components, wherein the Cas13b effector protein forms a complex with the one or more nucleic acid components and upon binding of the said complex to the locus of interest the effector protein induces the modification of the target locus of interest. In a preferred embodiment, the modification is the introduction of a strand break.

[0040] In such methods the target locus of interest may be comprised in a nucleic acid molecule in vitro. In such methods the target locus of interest may be comprised in a nucleic acid molecule within a cell. Preferably, in such methods the target locus of interest may be comprised in a RNA molecule in vitro. Also preferably, in such methods the target locus of interest may be comprised in a RNA molecule within a cell. The cell may be a prokaryotic cell or a eukaryotic cell. The cell may be a mammalian cell. The cell may be a rodent cell. The cell may be a mouse cell.

[0041] In any of the described methods the target locus of interest may be a genomic or epigenomic locus of interest. In any of the described methods the complex may be delivered with multiple guides for multiplexed use. In any of the described methods more than one protein(s) may be used.

[0042] In further aspects of the invention the nucleic acid components may comprise a CRISPR RNA (crRNA) sequence. Without limitation, the Applicants hypothesize that in such instances, the pre-crRNA may comprise secondary structure that is sufficient for processing to yield the mature crRNA as well as crRNA loading onto the effector protein. By means of example and not limitation, such secondary structure may comprise, consist essentially of or consist of a stem loop within the pre-crRNA, more particularly within the direct repeat.

[0043] In any of the described methods the effector protein and nucleic acid components may be provided via one or more polynucleotide molecules encoding the protein and/or nucleic acid component(s), and wherein the one or more polynucleotide molecules are operably configured to express the protein and/or the nucleic acid component(s). The one or more polynucleotide molecules may comprise one or more regulatory elements operably configured to express the protein and/or the nucleic acid component(s). The one or more polynucleotide molecules may be comprised within one or more vectors. In any of the described methods the target locus of interest may be a genomic or epigenomic locus of interest. In any of the described methods the complex may be delivered with multiple guides for multiplexed use. In any of the described methods more than one protein(s) may be used.

[0044] Regulatory elements may comprise inducible promotors. Polynucleotides and/or vector systems may comprise inducible systems.

[0045] In any of the described methods the one or more polynucleotide molecules may be comprised in a delivery system, or the one or more vectors may be comprised in a delivery system.

[0046] In any of the described methods the non-naturally occurring or engineered composition may be delivered via liposomes, particles including nanoparticles, exosomes, microvesicles, a gene-gun or one or more viral vectors.

[0047] The invention also provides a non-naturally occurring or engineered composition which is a composition having the characteristics as discussed herein or defined in any of the herein described methods.

[0048] In certain embodiments, the invention thus provides a non-naturally occurring or engineered composition, such as particularly a composition capable of or configured to modify a target locus of interest, said composition comprising a Type VI-B CRISPR-Cas loci effector protein and one or more nucleic acid components, wherein the effector protein forms a complex with the one or more nucleic acid components and upon binding of the said complex to the locus of interest the effector protein induces the modification of the target locus of interest. In certain embodiments, the effector protein may be a Cas13b loci effector protein.

[0049] The invention also provides in a further aspect a non-naturally occurring or engineered composition, such as particularly a composition capable of or configured to modify a target locus of interest, said composition comprising: (a) a guide RNA molecule (or a combination of guide RNA molecules, e.g., a first guide RNA molecule and a second guide RNA molecule, such as for multiplexing) or a nucleic acid encoding the guide RNA molecule (or one or more nucleic acids encoding the combination of guide RNA molecules); (b) a Type VI-B CRISPR-Cas loci effector protein or a nucleic acid encoding the Type VI-B CRISPR-Cas loci effector protein. In certain embodiments, the effector protein may be a Cas13b loci effector protein.

[0050] The invention also provides in a further aspect a non-naturally occurring or engineered composition comprising: (a) a guide RNA molecule (or a combination of guide RNA molecules, e.g., a first guide RNA molecule and a second guide RNA molecule) or a nucleic acid encoding the guide RNA molecule (or one or more nucleic acids encoding the combination of guide RNA molecules); (b) be a Cas13b loci effector protein.

[0051] The invention also provides a vector system comprising one or more vectors, the one or more vectors comprising one or more polynucleotide molecules encoding components of a non-naturally occurring or engineered composition which is a composition having the characteristics as defined in any of the herein described methods.

[0052] The invention also provides a delivery system comprising one or more vectors or one or more polynucleotide molecules, the one or more vectors or polynucleotide molecules comprising one or more polynucleotide molecules encoding components of a non-naturally occurring or engineered composition which is a composition having the characteristics discussed herein or as defined in any of the herein described methods.

[0053] The invention also provides a non-naturally occurring or engineered composition, or one or more polynucleotides encoding components of said composition, or vector or delivery systems comprising one or more polynucleotides encoding components of said composition for use in a therapeutic method of treatment. The therapeutic method of treatment may comprise gene or transcriptome editing, or gene therapy.

[0054] The invention also provides for methods and compositions wherein one or more amino acid residues of the effector protein may be modified e.g., an engineered or non-naturally-occurring effector protein or Cas13b. In an embodiment, the modification may comprise mutation of one or more amino acid residues of the effector protein. The one or more mutations may be in one or more catalytically active domains of the effector protein. The effector protein may have reduced or abolished nuclease activity compared with an effector protein lacking said one or more mutations. The effector protein may not direct cleavage of the RNA strand at the target locus of interest. In a preferred embodiment, the one or more mutations may comprise two mutations. In a preferred embodiment the one or more amino acid residues are modified in a Cas13b effector protein, e.g., an engineered or non-naturally-occurring effector protein or Cas13b. In certain embodiments, the effector protein comprises one or more of the following mutations: R116A, H121A, R1177A, H1182A (wherein amino acid positions correspond to amino acid positions of Cas13b protein originating from Bergeyella zoohelcum ATCC 43767), such as R116A, H121A, R1177A, and H1182A; R116A, H121A, and R1177A; R116A, H121A, and H1182A; R116A, R1177A, and H1182A; H121A, R1177A, and H1182A; R116A and H121A; R116A and R1177A; R116A and H1182A; H121A and R1177A; H121A and H1182A; R1177A and H1182A; R116A; H121A; R1177A; H1182A. The skilled person will understand that corresponding amino acid positions in different Cas13b proteins may be mutated to the same effect. In certain embodiments, one or more of mutations R116A, H121A, R1177A, H1182A abolish catalytic activity of the protein completely or partially (e.g. altered cleavage rate, altered specificity, etc.), such as R116A, H121A, R1177A, and H1182A; R116A, H121A, and R1177A; R116A, H121A, and H1182A; R116A, R1177A, and H1182A; H121A, R1177A, and H1182A; R116A and H121A; R116A and R1177A; R116A and H1182A; H121A and R1177A; H121A and H1182A; R1177A and H1182A; R116A; H121A; R1177A; H1182A. In certain embodiments, wherein amino acid positions correspond to amino acid positions of Cas13b protein originating from Prevotella sp. P5-125, the effector protein comprises H133A and H1058A mutations. In certain embodiments, the effector protein as described herein is a “dead” effector protein, such as a dead Cas13b effector protein (i.e. dCas13b). In certain embodiments, the effector protein has one or more mutations in HEPN domain 1. In certain embodiments, the effector protein has one or more mutations in HEPN domain 2. In certain embodiments, the effector protein has one or more mutations in HEPN domain 1 and HEPN domain 2. The effector protein may comprise one or more heterologous functional domains. The one or more heterologous functional domains may comprise one or more nuclear localization signal (NLS) domains. The one or more heterologous functional domains may comprise at least two or more NLS domains. The one or more NLS domain(s) may be positioned at or near or in proximity to a terminus of the effector protein (e.g., Cas13b effector protein) and if two or more NLSs, each of the two may be positioned at or near or in proximity to a terminus of the effector protein (e.g., Cas13b effector protein). The one or more heterologous functional domains may comprise one or more transcriptional activation domains. In a preferred embodiment the transcriptional activation domain may comprise VP64. The one or more heterologous functional domains may comprise one or more transcriptional repression domains. In a preferred embodiment the transcriptional repression domain comprises a KRAB domain or a SID domain (e.g. SID4×). The one or more heterologous functional domains may comprise one or more nuclease domains. In a preferred embodiment a nuclease domain comprises Fok1.

[0055] The invention also provides for the one or more heterologous functional domains to have one or more of the following activities: methylase activity, demethylase activity, translation activation activity, translation repression activity, transcription activation activity, transcription repression activity, transcription release factor activity, histone modification activity, nuclease activity, single-strand RNA cleavage activity, double-strand RNA cleavage activity, single-strand DNA cleavage activity, double-strand DNA cleavage activity and nucleic acid binding activity. At least one or more heterologous functional domains may be at or near the amino-terminus of the effector protein and/or wherein at least one or more heterologous functional domains is at or near the carboxy-terminus of the effector protein. The one or more heterologous functional domains may be fused to the effector protein. The one or more heterologous functional domains may be tethered to the effector protein. The one or more heterologous functional domains may be linked to the effector protein by a linker moiety.

[0056] In certain embodiments of the invention, the one or more heterologous functional domains may comprise epitope tags or reporters. Non-limiting examples of epitope tags include histidine (His) tags, V5 tags, FLAG tags, influenza hemagglutinin (HA) tags, Myc tags, VSV-G tags, and thioredoxin (Trx) tags. Examples of reporters include, but are not limited to, glutathione-S-transferase (GST), horseradish peroxidase (HRP), chloramphenicol acetyltransferase (CAT) beta-galactosidase, beta-glucuronidase, luciferase, green fluorescent protein (GFP), HcRed, DsRed, cyan fluorescent protein (CFP), yellow fluorescent protein (YFP), and autofluorescent proteins including blue fluorescent protein (BFP).

[0057] The invention also provides for the effector protein comprising an effector protein which is at least 50%, 60%, 70%, 80%, 85%, 90%, 91%, 92%, 93%, 94%, 95%, 96%, 97%, 98%, 99% or more homologous or identical to a wild type Cas13b effector protein of a prokaryotic genus selected from the group consisting of Porphyromonas, Prevotella, Bacteroides, Riemerella, Bergeyella, Alistipes, Myroides, Capnocytophaga, and Flavobacterium. The invention further provides for the effector protein comprising an effector protein which is at least 50%, 60%, 70%, 80%, 85%, 90%, 91%, 92%, 93%, 94%, 95%, 96%, 97%, 98%, 99% or more homologous or identical to a wild type Cas13b effector protein of a prokaryotic species selected from the group consisting of Porphyromonas gulae, Prevotella sp., Porphyromonas gingivalis, Bacteroides pyogenes, Riemerella anatipestifer, Bergeyella zoohelcum, Prevotella intermedia, Prevotella buccae, Alistipes sp., Prevotella aurantiaca, Myroides odoratimimus, Capnocytophaga canimorsus, Flavobacterium branchiophilum, and Flavobacterium columnare. The invention additionally provides for the effector protein comprising an effector protein which is at least 50%, 60%, 70%, 80%, 85%, 90%, 91%, 92%, 93%, 94%, 95%, 96%, 97%, 98%, 99% or more homologous or identical to a wild type Cas13b effector protein selected from the group consisting of Porphyromonas gulae Cas13b (accession number WP_039434803), Prevotella sp. P5-125 Cas13b (accession number WP_044065294), Porphyromonas gingivalis Cas13b (accession number WP_053444417), Porphyromonas sp. COT-052 OH4946 Cas13b (accession number WP_039428968), Bacteroides pyogenes Cas13b (accession number WP_034542281), Riemerella anatipestifer Cas13b (accession number WP_004919755). The most preferred effector proteins are those at least 50%, 60%, 70%, 80%, 85%, 90%, 91%, 92%, 93%, 94%, 95%, 96%, 97%, 98%, 99% or more homologous or identical to a wild type Cas13b effector protein selected from the group consisting of Porphyromonas gulae Cas13b (accession number WP_039434803), Prevotella sp. P5-125 Cas13b (accession number WP_044065294), Porphyromonas gingivalis Cas13b (accession number WP_053444417), Porphyromonas sp. COT-052 OH4946 Cas13b (accession number WP_039428968); and most specifically preferred are those at least 50%, 60%, 70%, 80%, 85%, 90%, 91%, 92%, 93%, 94%, 95%, 96%, 97%, 98%, 99% or more homologous or identical to a wild type Porphyromonas gulae Cas13b (accession number WP_039434803) or Prevotella sp. P5-125 Cas13b (accession number WP_044065294). The effector protein may comprise a chimeric effector protein comprising a first fragment from a first effector protein ortholog and a second fragment from a second effector protein ortholog, and wherein the first and second effector protein orthologs are different.

[0058] In certain embodiments, the effector protein may be at least 700 amino acids long. In preferred embodiments, the effector protein may be about 900 to about 1500 amino acids long, e.g., about 900 to about 1000 amino acids long, about 1000 to about 1100 amino acids long, about 1100 to about 1200 amino acids long, or about 1200 to about 1300 amino acids long, or about 1300 to about 1400 amino acids long, or about 1400 to about 1500 amino acids long, e.g., about 900, about 1000, about 1100, about 1200, about 1300, about 1400, about 1500, about 1600, about 1700, or about 1800 amino acids long.

[0059] In some embodiments, the Cas13b effector protein (a) comprises 900-1800 amino acids and two HEPN domains, (b) is naturally present in a prokaryotic genome within 10 kb upstream or downstream of a CRISPR array, (c) is the only protein comprising more than 700 amino acids within 10 kb upstream or downstream of the CRISPR array, and/or (d) there is no Cas1 gene or Cas2 gene within 10 kb upstream or downstream of the CRISPR array. In some embodiments, Csx27 or Csx28 is also present within 10 kb upstream or downstream of the CRISPR array.

[0060] In certain embodiments, the effector protein, particularly a Type VI-B loci effector protein, more particularly a Cas13b, comprises at least one and preferably at least two, such as more preferably exactly two, conserved RxxxxH motifs. Catalytic RxxxxH motifs are are characteristic of HEPN (Higher Eukaryotes and Prokaryotes Nucleotide-binding) domains. Hence, in certain embodiments, the effector proteincomprises at least one and preferably at least two, such as more preferably exactly two, HEPN domains. In certain embodiments, the HEPN domains may possess RNAse activity. In other embodiments, the HEPN domains may possess DNAse activity.

[0061] In certain embodiments, the Cas13b effector proteins as intended herein may be associated with a locus comprising short CRISPR repeats between 30 and 40 bp long, more typically between 34 and 38 bp long, even more typically between 36 and 37 bp long, e.g., 30, 31, 32, 33, 34, 35, 36, 37, 38, 39, or 40 bp long. In certain embodiments the CRISPR repeats are long or dual repeats between 80 and 350 bp long such as between 80 and 200 bp long, even more typically between 86 and 88 bp long, e.g., 80, 81, 82, 83, 84, 85, 86, 87, 88, 89, or 90 bp long

[0062] In certain embodiments, a protospacer adjacent motif (PAM) or PAM-like motif directs binding of the effector protein (e.g. a Cas13b effector protein) complex as disclosed herein to the target locus of interest. The PAM may be referred to as a PFS, or protospacer flanking site. In some embodiments, the PAM may be a 5′ PAM (i.e., located upstream of the 5′ end of the protospacer). In other embodiments, the PAM may be a 3′ PAM (i.e., located downstream of the 5′ end of the protospacer). In other embodiments, both a 5′ PAM and a 3′ PAM are required. In certain embodiments of the invention, a PAM or PAM-like motif may not be required for directing binding of the effector protein (e.g. a Cas13b effector protein). In certain embodiments, a 5′ PAM is D (i.e. A, G, or U). In certain embodiments, a 5′ PAM is D for Type VI-B1 effectors. See Example 1, Table 2. Methods exist to determine consensus 5′ and 3′ PAMs for a given Cas13b system. In certain embodiments of the invention, cleavage at repeat sequences may generate crRNAs (e.g. short or long crRNAs) containing a full spacer sequence flanked by a short nucleotide (e.g. 5, 6, 7, 8, 9, or 10 nt or longer if it is a dual repeat) repeat sequence at the 5′ end (this may be referred to as a crRNA “tag”) and the rest of the repeat at the 3′end. In certain embodiments, targeting by the effector proteins described herein may require the lack of homology between the crRNA tag and the target 5′ flanking sequence. This requirement may be similar to that described further in Samai et al. “Co-transcriptional DNA and RNA Cleavage during Type III CRISPR-Cas Immunity” Cell 161, 1164-1174, May 21, 2015, where the requirement is thought to distinguish between bona fide targets on invading nucleic acids from the CRISPR array itself, and where the presence of repeat sequences will lead to full homology with the crRNA tag and prevent autoimmunity.

[0063] In certain embodiments, the Cas13b effector protein is engineered and can comprise one or more mutations that reduce or eliminate nuclease activity, thereby reducing or eliminating RNA interfering activity. Mutations can also be made at neighboring residues, e.g., at amino acids near those that participate in the nuclease activity. In some embodiments, one or more putative catalytic nuclease domains are inactivated and the effector protein complex lacks cleavage activity and functions as an RNA binding complex. In a preferred embodiment, the resulting RNA binding complex may be linked with one or more functional domains as described herein.

[0064] In certain embodiments, the effector protein (CRISPR enzyme; Cas13; effector protein) according to the invention as described herein is a catalytically inactive or dead Cas13 effector protein (dCas13). In some embodiments, the dCas13 effector comprises mutations in the nuclease domain. In some embodiments, the dCas13 effector protein has been truncated. In some embodiments, to reduce the size of a fusion protein of the Cas13b effector and the one or more functional domains, the C-terminus of the Cas13b effector can be truncated while still maintaining its RNA binding function. For example, at least 20 amino acids, at least 50 amino acids, at least 80 amino acids, or at least 100 amino acids, or at least 150 amino acids, or at least 200 amino acids, or at least 250 amino acids, or at least 300 amino acids, or at least 350 amino acids, or up to 120 amino acids, or up to 140 amino acids, or up to 160 amino acids, or up to 180 amino acids, or up to 200 amino acids, or up to 250 amino acids, or up to 300 amino acids, or up to 350 amino acids, or up to 400 amino acids, may be truncated at the C-terminus of the Cas13b effector. Specific examples of Cas13b truncations include C-terminal 4984-1090, C-terminal 41026-1090, and C-terminal 41053-1090, C-terminal 4934-1090, C-terminal 4884-1090, C-terminal 4834-1090, C-terminal 4784-1090, and C-terminal 4734-1090, wherein amino acid positions correspond to amino acid positions of Prevotella sp. P5-125 Cas13b protein. See FIG. 15B.

[0065] In certain embodiments, the one or more functional domains are controllable, i.e. inducible.

[0066] In certain embodiments of the invention, the guide RNA or mature crRNA comprises, consists essentially of, or consists of a direct repeat sequence and a guide sequence or spacer sequence. In certain embodiments, the guide RNA or mature crRNA comprises, consists essentially of, or consists of a direct repeat sequence linked to a guide sequence or spacer sequence. In preferred embodiments of the invention, the mature crRNA comprises a stem loop or an optimized stem loop structure or an optimized secondary structure. In preferred embodiments the mature crRNA comprises a stem loop or an optimized stem loop structure in the direct repeat sequence, wherein the stem loop or optimized stem loop structure is important for cleavage activity. In certain embodiments, the mature crRNA preferably comprises a single stem loop. In certain embodiments, the direct repeat sequence preferably comprises a single stem loop. In certain embodiments, the cleavage activity of the effector protein complex is modified by introducing mutations that affect the stem loop RNA duplex structure. In preferred embodiments, mutations which maintain the RNA duplex of the stem loop may be introduced, whereby the cleavage activity of the effector protein complex is maintained. In other preferred embodiments, mutations which disrupt the RNA duplex structure of the stem loop may be introduced, whereby the cleavage activity of the effector protein complex is completely abolished.

[0067] The invention also provides for the nucleotide sequence encoding the effector protein being codon optimized for expression in a eukaryote or eukaryotic cell in any of the herein described methods or compositions. In an embodiment of the invention, the codon optimized nucleotide sequence encoding the effector protein encodes any Cas13b discussed herein and is codon optimized for operability in a eukaryotic cell or organism, e.g., such cell or organism as elsewhere herein mentioned, for instance, without limitation, a yeast cell, or a mammalian cell or organism, including a mouse cell, a rat cell, and a human cell or non-human eukaryote organism, e.g., plant.

[0068] In certain embodiments of the invention, at least one nuclear localization signal (NLS) is attached to the nucleic acid sequences encoding the Cas13b effector proteins. In preferred embodiments at least one or more C-terminal or N-terminal NLSs are attached (and hence nucleic acid molecule(s) coding for the Cas13b effector protein can include coding for NLS(s) so that the expressed product has the NLS(s) attached or connected). In certain embodiments of the invention, at least one nuclear export signal (NES) is attached to the nucleic acid sequences encoding the Cas13b effector proteins. In preferred embodiments at least one or more C-terminal or N-terminal NESs are attached (and hence nucleic acid molecule(s) coding for the Cas13b effector protein can include coding for NES(s) so that the expressed product has the NES(s) attached or connected). In a preferred embodiment a C-terminal and/or N-terminal NLS or NES is attached for optimal expression and nuclear targeting in eukaryotic cells, preferably human cells. In a preferred embodiment, the codon optimized effector protein is Cas13b and the spacer length of the guide RNA is from 15 to 35 nt. In certain embodiments, the spacer length of the guide RNA is at least 16 nucleotides, such as at least 17 nucleotides, preferably at least 18 nt, such as preferably at least 19 nt, at least 20 nt, at least 21 nt, or at least 22 nt. In certain embodiments, the spacer length is from 15 to 17 nt, from 17 to 20 nt, from 20 to 24 nt, eg. 20, 21, 22, 23, or 24 nt, from 23 to 25 nt, e.g., 23, 24, or 25 nt, from 24 to 27 nt, from 27-30 nt, from 30-35 nt, or 35 nt or longer. In certain embodiments of the invention, the codon optimized effector protein is Cas13b and the direct repeat length of the guide RNA is at least 16 nucleotides. In certain embodiments, the codon optimized effector protein is Cas13b and the direct repeat length of the guide RNA is from 16 to 20 nt, e.g., 16, 17, 18, 19, or 20 nucleotides. In certain preferred embodiments, the direct repeat length of the guide RNA is 19 nucleotides.

[0069] The invention also encompasses methods for delivering multiple nucleic acid components, wherein each nucleic acid component is specific for a different target locus of interest thereby modifying multiple target loci of interest. The nucleic acid component of the complex may comprise one or more protein-binding RNA aptamers. The one or more aptamers may be capable of binding a bacteriophage coat protein. The bacteriophage coat protein may be selected from the group comprising Qβ, F2, GA, fr, JP501, MS2, M12, R17, BZ13, JP34, JP500, KU1, M11, MX1, TW18, VK, SP, FI, ID2, NL95, TW19, AP205, ϕCb5, ϕCb8r, ϕCb12r, ϕCb23r, 7s and PRR1. In a preferred embodiment the bacteriophage coat protein is MS2. The invention also provides for the nucleic acid component of the complex being 30 or more, 40 or more or 50 or more nucleotides in length.

[0070] In a further aspect, the invention provides a eukaryotic cell comprising a modified target locus of interest, wherein the target locus of interest has been modified according to in any of the herein described methods. A further aspect provides a cell line of said cell. Another aspect provides a multicellular organism comprising one or more said cells.

[0071] In certain embodiments, the modification of the target locus of interest may result in: the eukaryotic cell comprising altered expression of at least one gene product; the eukaryotic cell comprising altered expression of at least one gene product, wherein the expression of the at least one gene product is increased; the eukaryotic cell comprising altered expression of at least one gene product, wherein the expression of the at least one gene product is decreased; or the eukaryotic cell comprising an edited genome.

[0072] In certain embodiments, the eukaryotic cell may be a mammalian cell or a human cell.

[0073] In further embodiments, the non-naturally occurring or engineered compositions, the vector systems, or the delivery systems as described in the present specification may be used for: site-specific gene knockout; site-specific genome editing; RNA sequence-specific interference; or multiplexed genome engineering.

[0074] Also provided is a gene product from the cell, the cell line, or the organism as described herein. In certain embodiments, the amount of gene product expressed may be greater than or less than the amount of gene product from a cell that does not have altered expression or edited genome. In certain embodiments, the gene product may be altered in comparison with the gene product from a cell that does not have altered expression or edited genome.

[0075] Also provided is an engineered and non-naturally occurring eukaryotic cell, comprising at least one of (i) a Cas13b effector protein as described herein, or (ii) a guide RNA capable of forming a CRISPR-Cas complex with a Cas13b effector protein. In some embodiments, (i) and/or (ii) are transiently expressed or introduced into the cell. Also provided are organisms comprising such cells, cell lines, progeny of said cell lines or organisms. The organism may be a vertebrate, for example a mammal. Alternatively, the organism may be a plant or a fungus.

[0076] In a further aspect, the invention provides a eukaryotic cell comprising a nucleotide sequence encoding the CRISPR system described herein which ensures the generation of a modified target locus of interest, wherein the target locus of interest is modified according to in any of the herein described methods. A further aspect provides a cell line of said cell. Another aspect provides a multicellular organism comprising one or more said cells.

[0077] In certain embodiments, the modification of the target locus of interest may result in: the eukaryotic cell comprising altered (protein) expression of at least one gene product; the eukaryotic cell comprising altered (protein) expression of at least one gene product, wherein the (protein) expression of the at least one gene product is increased; the eukaryotic cell comprising altered (protein) expression of at least one gene product, wherein the (protein) expression of the at least one gene product is decreased; or the eukaryotic cell comprising an edited transcriptome.

[0078] In certain embodiments, the eukaryotic cell may be a mammalian cell or a human cell.

[0079] In further embodiments, the non-naturally occurring or engineered compositions, the vector systems, or the delivery systems as described in the present specification may be used for RNA sequence-specific interference, RNA sequence specific modulation of expression (inluding isoform specific expression), stability, localization, functionality (e.g. ribosomal RNAs or miRNAs), etc.; or multiplexing of such processes.

[0080] In further embodiments, the non-naturally occurring or engineered compositions, the vector systems, or the delivery systems as described in the present specification may be used for RNA detection and/or quantification in a sample, such as a biological sample. In certain embodiments, RNA detection is in a cell. In an embodiment, the invention provides a method of detecting a target RNA in a sample, comprising (a) incubating the sample with i) a Type VI-B CRISPR-Cas effector protein capable of cleaving RNA, ii) a guide RNA capable of hybridizing to the target RNA, and iii) an RNA-based cleavage inducible reporter capable of being non-specifically and detectably cleaved by the effector protein, (b) detecting said target RNA based on the signal generated by cleavage of said RNA-based cleavage inducible reporter.

[0081] In an embodiment the Type VI-B CRISPR-Cas effector protein is a Cas13b effector protein; for example, a Cas13b effector protein as described herein. In an embodiment, the RNA-based cleavage inducible reporter construct comprises a fluorochrome and a quencher. In certain embodiments, the sample comprises a cell-free biological sample. In other embodiments, the sample comprises or a cellular sample, for example, without limitation a plant cell, or an animal cell. In an embodiment of the invention, the target RNA comprises a pathogen RNA, including, but not limited to a target RNA from a virus, bacteria, fungus, or parasite. In an embodiment, the guide RNA is designed to detect a target RNA which comprises a single nucleotide polymorphism or a splice variant of an RNA transcript. In an embodiment, the guide RNA comprises one or more mismatched nucleotides with the target RNA. In certain embodiments, the guide RNA hybridizes to aa target molecule that is diagnostic for a disease state, such as, but not limited to, cancer, or an immune disease.

[0082] The invention provides a ribonucleic acid (RNA) detection system, comprising a) a Type VI-B CRISPR-Cas effector protein capable of cleaving RNA, b) a guide RNA capable of binding to a target RNA, and c) an RNA-based cleavage inducible reporter capable of being non-specifically and detectably cleaved by the effector protein. Further, the invention provides a kit for RNA detection, which comprises a) a Type VI-B CRISPR-Cas effector protein capable of cleaving RNA, and b) an RNA-based cleavage inducible reporter capable of being non-specifically and detectably cleaved by the effector protein. In certain embodiments, the RNA-based cleavage inducible reporter construct comprises a fluorochrome and a quencher.

[0083] In further embodiments, the non-naturally occurring or engineered compositions, the vector systems, or the delivery systems as described in the present specification may be used for generating disease models and/or screening systems.

[0084] In further embodiments, the non-naturally occurring or engineered compositions, the vector systems, or the delivery systems as described in the present specification may be used for: site-specific transcriptome editing or purturbation; nucleic acid sequence-specific interference; or multiplexed genome engineering.

[0085] In aspects of the invention, the Cas13b effector proteins, or systems described herein, may be used in the treatment, prevention, prophylaxis, or suppression of viral pathogenesis, infection, or propagation in a mammalian subject. Aspects of the invention provide a Cas13b CRISPR system comprising (a) a Cas13b CRISPR effector protein and/or a polynucleic acid encoding a Cas13b CRISPR effector protein and (b) one or more guide RNAs and/or one or more polynucleic acids encoding one or more guide RNAs designed to bind to one or more target molecules of a virus for use in treating, preventing, suppressing, and/or alleviating viral pathogenesis, infection and/or propagation in a subject. The Cas13b effector protein may be as herein defined, including as to preferred wild-type Cas13b proteins and preferred derivatives and modifications thereof.

[0086] In some embodiments, the Cas13b effector proteins, or systems described herein, may be used in the treatment, prevention, prophylaxis, or suppression of Lassa virus pathogenesis, infection, or propagation in a mammalian subject. Lassa virus is associated with DCs and vascular endothelial cells (see Kunz, S. et. al. 2005. Journal of Virology).

[0087] In some embodiments, the Cas13b effector proteins, or systems described herein, may be used in the treatment, prevention, prophylaxis, or suppression of Ebola virus pathogenesis, infection, or propagation in a mammalian subject. Ebola virus is associated with numerous tissues and cell types including DCs, macrophages, hepatocytes, etc. (see Martines, R. B. et. al. 2015. Journal of Pathology).

[0088] In some embodiments, the Cas13b effector proteins, or systems described herein, may be used in the treatment, prevention, prophylaxis, or suppression of SARS-CoV pathogenesis, infection, or propagation in a mammalian subject. SARS-CoV is associated with lung tissues and cells (see To, K F. et. al. 2004. Journal of Pathology).

[0089] In some embodiments, the Cas13b effector proteins, or systems described herein, may be used in the treatment, prevention, prophylaxis, or suppression of Zika virus pathogenesis, infection, or propagation in a mammalian subject. Zika virus is associated with numerous tissues and cell types, including bodily fluids, placenta, brain, etc. (see Miner, J. J. & Diamond, M. S. 2017. Cell Host & Microbe).

[0090] In some embodiments, the Cas13b effector proteins, or systems described herein, may be used in the treatment, prevention, prophylaxis, or suppression of Dengue virus pathogenesis, infection, or propagation in a mammalian subject. Dengue virus is associated with numerous tissues and cell types, including DCs, macrophages, liver, etc. (see Flipse, J. et. al. 2016. Journal of General Virology).

[0091] In some embodiments, the Cas13b effector proteins, or systems described herein, may be used in the treatment, prevention, prophylaxis, or suppression of Chikungunya virus pathogenesis, infection, or propagation in a mammalian subject. Chikungunya virus is associated with numerous tissues and cell types, including immune cells, liver, central nervous system, etc. (see Schwartz, O. & Albert, M. L. 2010. Nature Reviews).

[0092] In some embodiments, the Cas13b effector proteins, or systems described herein, may be used in the treatment, prevention, prophylaxis, or suppression of Influenza virus pathogenesis, infection, or propagation in a mammalian subject. Influenza virus is associated with lung epithelial cells and macrophages (see Medina, R. A. & Garcia-Sastre A. 2011 Nature Reviews).

[0093] In some embodiments, the Cas13b effector proteins, or systems described herein, may be used in the treatment, prevention, prophylaxis, or suppression of HIV virus pathogenesis, infection, or propagation in a mammalian subject. HIV virus is associated with T cells and macrophages (see Weiss, R. A. 2002. IUBMB Life).

[0094] In some embodiments, the Cas13b effector proteins, or systems described herein, may be used in the treatment, prevention, prophylaxis, or suppression of Rotavirus virus pathogenesis, infection, or propagation in a mammalian subject. Rotavirus virus is associated with intestine tissues and cells (see Lopez, S & Arias, C. F. 2006. CTMI).

[0095] In some embodiments, the Cas13b effector proteins, or systems described herein, may be used in the treatment, prevention, prophylaxis, or suppression of Herpes Simplex (HSV-1) pathogenesis, infection, or propagation in a mammalian subject. HSV-1 is associated with epithelial cells and neuronal cells (see Schelhaas, M. et. al. 2003. Journal of General Virology).

[0096] In some embodiments, the Cas13b effector proteins, or systems described herein, may be used in the treatment, prevention, prophylaxis, or suppression of HCV pathogenesis, infection, or propagation in a mammalian subject. HCV is associated with liver tissues and cells (see Ding, Q, et. al. 2014. Cell Host & Microbe).

[0097] In some embodiments, the Cas13b effector proteins, or systems described herein, may be used in the treatment, prevention, prophylaxis, or suppression of HBV pathogenesis, infection, or propagation in a mammalian subject. HBV is associated with liver tissues and cells (see Schieck, A. et. al. 2013. Hepatology).

[0098] Also provided is a gene product from the cell, the cell line, or the organism as described herein. In certain embodiments, the amount of gene product expressed may be greater than or less than the amount of gene product from a cell that does not have altered expression or edited genome. In certain embodiments, the gene product may be altered in comparison with the gene product from a cell that does not have altered expression or edited genome.

[0099] These and other embodiments are disclosed or are obvious from and encompassed by, the following Detailed Description.

[0100] Accordingly, it is an object of the invention not to encompass within the invention any previously known product, process of making the product, or method of using the product such that Applicants reserve the right and hereby disclose a disclaimer of any previously known product, process, or method. It is further noted that the invention does not intend to encompass within the scope of the invention any product, process, or making of the product or method of using the product, which does not meet the written description and enablement requirements of the USPTO (35 U.S.C. § 112, first paragraph) or the EPO (Article 83 of the EPC), such that Applicants reserve the right and hereby disclose a disclaimer of any previously described product, process of making the product, or method of using the product. It may be advantageous in the practice of the invention to be in compliance with Art. 53(c) EPC and Rule 28(b) and (c) EPC. Nothing herein is to be construed as a promise.

[0101] It is noted that in this disclosure and particularly in the claims and/or paragraphs, terms such as “comprises”, “comprised”, “comprising” and the like can have the meaning attributed to it in U.S. patent law; e.g., they can mean “includes”, “included”, “including”, and the like; and that terms such as “consisting essentially of” and “consists essentially of” have the meaning ascribed to them in U.S. patent law, e.g., they allow for elements not explicitly recited, but exclude elements that are found in the prior art or that affect a basic or novel characteristic of the invention.

### BRIEF DESCRIPTION OF THE DRAWINGS

[0102] The novel features of the invention are set forth with particularity in the appended claims. A better understanding of the features and advantages of the present invention will be obtained by reference to the following detailed description that sets forth illustrative embodiments, in which the principles of the invention are utilized, and the accompanying drawings of which:

[0103] FIG. 1 shows a list of wild-type Cas13b orthologs, as well as their amino acid sequences, together with the source organism and the protein accession number.

[0104] FIG. 2 shows a classification of each of the Cas13b orthologs of FIG. 1 with their relative efficacy in knockdown of luciferase expression in mammalian cell culture.

[0105] FIG. 3 compares activity of each of the active Cas13b orthologs, controlling for guide sequence.

[0106] FIG. 4 compares activity of two of the Cas13b orthologs—Porphyromonas gulae WP_039434803 and Prevotella sp. P5-125 WP_044065294—with activity of C2c2/Cas13a across various guide sequences.

[0107] FIG. 5: Characterization of a highly active Cas13b ortholog for RNA knockdown. (A) Schematic of stereotypical Cas13 loci and corresponding crRNA structure. (B) Evaluation of 19 Cas13a, 15 Cas13b, and 7 Cas13c orthologs for luciferase knockdown using two different guides. Orthologs with efficient knockdown using both guides are labeled with their host organism name. (C) PspCas13b and LwaCas13a knockdown activity are compared by tiling guides against Gluc and measuring luciferase expression. (D) PspCas13b and LwaCas13a knockdown activity are compared by tiling guides against Cluc and measuring luciferase expression. (E) Expression levels in log 2 (transcripts per million (TPM)) values of all genes detected in RNA-seq libraries of non-targeting control (x-axis) compared to Gluc-targeting condition (y-axis) for LwaCas13a (red) and shRNA (black). Shown is the mean of three biological replicates. The Gluc transcript data point is labeled. (F) Expression levels in log 2 (transcripts per million (TPM)) values of all genes detected in RNA-seq libraries of non-targeting control (x-axis) compared to Gluc-targeting condition (y-axis) for PspCas13b (blue) and shRNA (black). Shown is the mean of three biological replicates. The Gluc transcript data point is labeled. (G) Number of significant off-targets from Gluc knockdown for LwaCas13a, PspCas13b, and shRNA from the transcriptome wide analysis in E and F.

[0108] FIG. 6: Engineering dCas13b-ADAR fusions for RNA editing. (A) Schematic of RNA editing by dCas13b-ADAR fusion proteins. (B) Schematic of Cypridina luciferase W85X target and targeting guide design. (C) Quantification of luciferase activity restoration for Cas13b-dADAR1 (left) and Cas13b-ADAR2-cd (right) with tiling guides of length 30, 50, 70, or 84 nt. (D) Schematic of target site for targeting Cypridinia luciferase W85X. (E) Sequencing quantification of A->I editing for 50 nt guides targeting Cypridinia luciferase W85X.

[0109] FIG. 7: Measuring sequence flexibility for RNA editing by REPAIRv1. (A) Schematic of screen for determining Protospacer Flanking Site (PFS) preferences of RNA editing by REPAIRv1. (B) Distributions of RNA editing efficiencies for all 4-N PFS combinations at two different editing sites (C) Quantification of the percent editing of REPAIRv1 at Cluc W85 across all possible 3 base motifs. (D) Heatmap of 5′ and 3′ base preferences of RNA editing at Cluc W85 for all possible 3 base motifs

[0110] FIG. 8: Correction of disease-relevant mutations with REPAIRv1. (A) Schematic of target and guide design for targeting AVPR2 878G>A. (B) The 878G>A mutation in AVPR2 is corrected to varying percentages using REPAIRv1 with three different guide designs. (C) Schematic of target and guide design for targeting FANCC 1517G>A. (D) The 1517G>A mutation in FANCC is corrected to varying percentages using REPAIRv1 with three different guide designs. (E) Quantification of the percent editing of 34 different disease-relevant G>A mutations using REPAIRv1. (F) Analysis of all the possible G>A mutations that could be corrected as annotated by the ClinVar database. (G) The distribution of editing motifs for all G>A mutations in ClinVar is shown versus the editing efficiency by REPAIRv1 per motif as quantified on the Gluc transcript.

[0111] FIG. 9: Characterizing specificity of REPAIRv1. (A) Schematic of KRAS target site and guide design. (B) Quantification of percent editing for tiled KRAS-targeting guides. Editing percentages are shown at the on-target and neighboring adenosine sites. For each guide, the region of duplex RNA is indicated by a red rectangle. (C) Transcriptome-wide sites of significant RNA editing by REPAIRv1 with Cluc targeting guide. The on-target site Cluc site (254 A>G) is highlighted in orange. (D) Transcriptome-wide sites of significant RNA editing by REPAIRv1 with non-targeting guide.

[0112] FIG. 10: Rational mutagenesis of ADAR2 to improve the specificity of REPAIRv1. (A) Quantification of luciferase signal restoration by various dCas13-ADAR2 mutants as well as their specificity score plotted along a schematic for the contacts between key ADAR2 deaminase residues and the dsRNA target. The specificity score is defined as the ratio of the luciferase signal between targeting guide and non-targeting guide conditions. (B) Quantification of luciferase signal restoration by various dCas13-ADAR2 mutants versus their specificity score. (C) Measurement of the on-target editing fraction as well as the number of significant off-targets for each dCas13-ADAR2 mutant by transcriptome wide sequencing of mRNAs. (D) Transcriptome-wide sites of significant RNA editing by REPAIRv1 and REPAIRv2 with a guide targeting a pretermination site in Cluc. The on-target Cluc site (254 A>G) is highlighted in orange. (E) RNA sequencing reads surrounding the on-target Cluc editing site (254 A>G) highlighting the differences in off-target editing between REPAIRv1 and REPAIRv2. All A>G edits are highlighted in red while sequencing errors are highlighted in blue. (F) RNA editing by REPAIRv1 and REPAIRv2 with guides targeting an out-of-frame UAG site in the endogenous KRAS and PPIB transcripts. The on-target editing fraction is shown as a sideways bar chart on the right for each condition row. The duplex region formed by the guide RNA is shown by a red outline box.

[0113] FIG. 11: Bacterial screening of Cas13b orthologs for in vivo efficiency and PFS determination. (A) Schematic of bacterial assay for determining the PFS of Cas13b orthologs. Cas13b orthologs with beta-lactamase targeting spacers are co-transformed with beta-lactamase expression plasmids and subjected to double selection. (B) Quantitation of interference activity of Cas13b orthologs targeting beta-lactamase as measured by colony forming units (cfu). (C) PFS logos for Cas13b orthologs as determined by depleted sequences from the bacterial assay.

[0114] FIG. 12: Optimization of Cas13b knockdown and further characterization of mismatch specificity. (A) Gluc knockdown with two different guides is measured using the top 2 Cas13a and top 4 Cas13b orthologs fused to a variety of nuclear localization and nuclear export tags. (B) Knockdown of KRAS is measured for LwaCas13a, RanCas13b, PguCas13b, and PspCas13b with four different guides and compared to four position-matched shRNA controls. (C) Schematic of the single and double mismatch plasmid libraries used for evaluating the specificity of LwaCas13a and PspCas13b knockdown. Every possible single and double mismatch is present in the target sequence as well as in 3 positions directly flanking the 5′ and 3′ ends of the target site. (D) The depletion level of transcripts with the indicated single mismatches are plotted as a heatmap for both the LwaCas13a and PspCas13b conditions. (E) The depletion level of transcripts with the indicated double mismatches are plotted as a heatmap for both the LwaCas13a and PspCas13b conditions.

[0115] FIG. 13: Characterization of design parameters for dCas13-ADAR2 RNA editing. (A) Knockdown efficiency of Gluc targeting for wildtype Cas13b and catalytically inactive H133A/H1058A Cas13b (dCas13b). (B) Quantification of luciferase activity restoration by dCas13b fused to either the wildtype ADAR2 catalytic domain or the hyperactive E488Q mutant ADAR2 catalytic catalytic domain, tested with tiling Cluc targeting guides. (C) Guide design and sequencing quantification of A->I editing for 30 nt guides targeting Cypridinia luciferase W85X. (D) Guide design and sequencing quantification of A->I editing for 50 nt guides targeting PPIB. (E) Influence of linker choice on luciferase activity restoration by REPAIRv1. (F) Influence of base identify opposite the targeted adenosine on luciferase activity restoration by REPAIRv1.

[0116] FIG. 14: ClinVar motif distribution for G>A mutations. The number of each possible triplet motif observed in the ClinVar database for all G>A mutations.

[0117] FIG. 15: (A) Truncations of dCas13b still have functional RNA editing. Various N-terminal and C-terminal truncations of dCas13b allow for RNA editing as measured by restoration of luciferase signal. FIG. 15: (B) Further examples of dCas13b-ADAR constructs with different C-terminal truncations of dCas13b.

[0118] FIG. 16: Comparison of other programmable ADAR systems with the dCas13-ADAR2 editor. (A) Schematic of two programmable ADAR schemes: BoxB-based targeting and full length ADAR2 targeting. In the BoxB scheme (top), the ADAR2 deaminase domain (ADAR2_{DD}(E488Q)) is fused to a small bacterial virus protein called lambda N (λN), which binds specifically a small RNA sequence called BoxB-λ. A guide RNA containing two BoxB-λ, hairpins can then guide the ADAR2 D_{DD}(E488Q), −λN for site specific editing. In the full length ADAR2 scheme (bottom), the dsRNA binding domains of ADAR2 bind a hairpin in the guide RNA, allowing for programmable ADAR2 editing. (B) Transcriptome-wide sites of significant RNA editing by BoxB-ADAR2 D_{DD}(E488Q) with a guide targeting Cluc and a non-targeting guide. The on-target Cluc site (254 A>G) is highlighted in orange. (C) Transcriptome-wide sites of significant RNA editing by ADAR2 with a guide targeting Cluc and a non-targeting guide. The on-target Cluc site (254 A>G) is highlighted in orange. (D) Transcriptome-wide sites of significant RNA editing by REPAIRv1 with a guide targeting Cluc and a non-targeting guide. The on-target Cluc site (254 A>G) is highlighted in orange. (E) Quantitation of on-target editing rate percentage for BoxB-ADAR2 D_{DD}(E488Q), ADAR2, and REPAIRv1 for targeting guides against Cluc. (F) Overlap of off-target sites between different targeting and non-targeting conditions for programmable ADAR systems.

[0119] FIG. 17: Efficiency and specificity of dCas13b-ADAR2 mutants. (A) Quantitation of luciferase activity restoration by dCas13b-ADAR2_{DD}(E488Q) mutants for Cluc-targeting and non-targeting guides. (B) Relationship between the ratio of targeting and non-targeting guides and the number of RNA-editing off-targets as quantified by transcriptome-wide sequencing. (C) Quantification of number of transcriptome-wide off-target RNA editing sites versus on-target Cluc editing efficiency for dCas13b-ADAR2_{DD}(E488Q) mutants.

[0120] FIG. 18: Transcriptome-wide specificity of RNA editing by dCas13b-ADAR2_{DD}(E488Q) mutants. (A) Transcriptome-wide sites of significant RNA editing by dCas13b-ADAR2 D_{DD}(E488Q) mutants with a guide targeting Cluc. The on-target Cluc site (254 A>G) is highlighted in orange. (B) Transcriptome-wide sites of significant RNA editing by dCas13b-ADAR2 D_{DD}(E488Q) mutants with a non-targeting guide.

[0121] FIG. 19: Characterization of motif biases in the off-targets of dCas13b-ADAR2_{DD}(E488Q) editing. (A) For each dCas13b-ADAR2_{DD}(E488Q) mutant, the motif present across all A>G off-target edits in the transcriptome is shown. (B) The distribution of off-target A>G edits per motif identity is shown for REPAIRv1 with targeting and non-targeting guide. (C) The distribution of off-target A>G edits per motif identity is shown for REPAIRv2 with targeting and non-targeting guide.

[0122] FIG. 20: Further characterization of REPAIRv1 and REPAIRv2 off-targets. (A) Histogram of the number of off-targets per transcript for REPAIRv1. (B) Histogram of the number of off-targets per transcript for REPAIRv2. (C) Variant effect prediction of REPAIRv1 off targets. (D) Distribution of potential oncogenic effects of REPAIRv1 off targets. (E) Variant effect prediction of REPAIRv2 off targets. (F) Distribution of potential oncogenic effects of REPAIRv2 off targets.

[0123] FIG. 21: RNA editing efficiency and specificity of REPAIRv1 and REPAIRv2. (A) Quantification of percent editing of KRAS with KRAS-targeting guide 1 at the targeted adenosine and neighboring sites for REPAIRv1 and REPAIRv2. (B) Quantification of percent editing of KRAS with KRAS-targeting guide 3 at the targeted adenosine and neighboring sites for REPAIRv1 and REPAIRv2. (C) Quantification of percent editing of PPIB with PPIB-targeting guide 2 at the targeted adenosine and neighboring sites for REPAIRv1 and REPAIRv2.

[0124] FIG. 22: Demonstration of all potential codon changes with a A>G RNA editor. (A) Table of all potential codon transitions enabled by A>I editing. (B) A codon table demonstrating all the potential codon transitions enabled by A>I editing.

[0125] The figures herein are for illustrative purposes only and are not necessarily drawn to scale.

### DETAILED DESCRIPTION OF THE INVENTION

[0126] In general, a CRISPR-Cas or CRISPR system as used in the foregoing documents, such as WO 2014/093622 (PCT/US2013/074667) refers collectively to transcripts and other elements involved in the expression of or directing the activity of CRISPR-associated (“Cas”) genes, including sequences encoding a Cas gene, a tracr (trans-activating CRISPR) sequence (e.g. tracrRNA or an active partial tracrRNA), a tracr-mate sequence (encompassing a “direct repeat” and a tracrRNA-processed partial direct repeat in the context of an endogenous CRISPR system), a guide sequence (also referred to as a “spacer” in the context of an endogenous CRISPR system), or “RNA(s)” as that term is herein used (e.g., RNA(s) to guide Cas, such as Cas9, e.g. CRISPR RNA and transactivating (tracr) RNA or a single guide RNA (sgRNA) (chimeric RNA)) or other sequences and transcripts from a CRISPR locus. In general, a CRISPR system is characterized by elements that promote the formation of a CRISPR complex at the site of a target sequence (also referred to as a protospacer in the context of an endogenous CRISPR system).

[0127] When the CRISPR protein is a Class 2 Type VI-B effector (for example, a Cas13b effector protein), a tracrRNA is not required. In an engineered system of the invention, the direct repeat may encompass naturally-occuring sequences or non-naturally-occurring sequences. The direct repeat of the invention is not limited to naturally occurring lengths and sequences. A direct repeat can be 36nt in length, but a longer or shorter direct repeat can vary. For example, a direct repeat can be 30nt or longer, such as 30-100 nt or longer. For example, a direct repeat can be 30nt, 40nt, 50nt, 60nt, 70nt, 80nt, 90nt, 100nt, or longer in length. In some embodiments, a direct repeat of the invention can include synthetic nucleotide sequences inserted between the 5′ and 3′ ends of naturally occurring direct repeat. In certain embodiments, the inserted sequence may be self-complementary, for example, 20%, 30%, 40%, 50%, 60%, 70%, 80%, 90%, or 100% self complementary. Furthermore, a direct repeat of the invention may include insertions of nucleotides such as an aptamer or sequences that bind to an adapter protein (for association with functional domains). In certain embodiments, one end of a direct repeat containing such an insertion is roughly the first half of a short DR and the other end is roughly the second half of the short DR.

[0128] In the context of formation of a CRISPR complex, “target sequence” refers to a sequence to which a guide sequence is designed to have complementarity, where hybridization between a target sequence and a guide sequence promotes the formation of a CRISPR complex. A target sequence may comprise RNA polynucleotides. In some embodiments, a target sequence is located in the nucleus or cytoplasm of a cell. In some embodiments, direct repeats may be identified in silico by searching for repetitive motifs that fulfill any or all of the following criteria: 1. found in a 2 Kb window of genomic sequence flanking the CRISPR locus; 2. span from 20 to 50 bp; and 3. interspaced by 20 to 50 bp. In some embodiments, 2 of these criteria may be used, for instance 1 and 2, 2 and 3, or 1 and 3. In some embodiments, all 3 criteria may be used.

[0129] In embodiments of the invention the terms guide sequence and guide RNA, i.e. RNA capable of guiding Cas13b to a target genomic locus, are used interchangeably as in foregoing cited documents such as WO 2014/093622 (PCT/US2013/074667). In general, a guide sequence is any polynucleotide sequence having sufficient complementarity with a target polynucleotide sequence to hybridize with the target sequence and direct sequence-specific binding of a CRISPR complex to the target sequence. In some embodiments, the degree of complementarity between a guide sequence and its corresponding target sequence, when optimally aligned using a suitable alignment algorithm, is about or more than about 50%, 60%, 75%, 80%, 85%, 90%, 95%, 97.5%, 99%, or more. Optimal alignment may be determined with the use of any suitable algorithm for aligning sequences, non-limiting example of which include the Smith-Waterman algorithm, the Needleman-Wunsch algorithm, algorithms based on the Burrows-Wheeler Transform (e.g. the Burrows Wheeler Aligner), ClustalW, Clustal X, BLAT, Novoalign (Novocraft Technologies; available at www.novocraft.com), ELAND (Illumina, San Diego, Calif.), SOAP (available at soap.genomics.org.cn), and Maq (available at maq.sourceforge.net). In some embodiments, a guide sequence is about or more than about 5, 10, 11, 12, 13, 14, 15, 16, 17, 18, 19, 20, 21, 22, 23, 24, 25, 26, 27, 28, 29, 30, 35, 40, 45, 50, 75, or more nucleotides in length. In some embodiments, a guide sequence is less than about 75, 50, 45, 40, 35, 30, 25, 20, 15, 12, or fewer nucleotides in length. Preferably the guide sequence is 10-40 nucleotides long, such as 20-30 or 20-40 nucleotides long or longer, such as 30 nucleotides long or about 30 nucleotides long. In certain embodiments, the guide sequence is 10-30 nucleotides long, such as 20-30 or 20-40 nucleotides long or longer, such as 30 nucleotides long or about 30 nucleotides long for Cas13b effectors. In certain embodiments, the guide sequence is 10-30 nucleotides long, such as 20-30 nucleotides long, such as 30 nucleotides long or about 30 nucleotides long for Cas13b effectors originating from Bergeyella zoohelcum (such as Bergeyella zoohelcum ATCC 43767). The ability of a guide sequence to direct sequence-specific binding of a CRISPR complex to a target sequence may be assessed by any suitable assay. For example, the components of a CRISPR system sufficient to form a CRISPR complex, including the guide sequence to be tested, may be provided to a host cell having the corresponding target sequence, such as by transfection with vectors encoding the components of the CRISPR sequence, followed by an assessment of preferential cleavage within the target sequence, such as by Surveyor assay as described herein. Similarly, cleavage of a target polynucleotide sequence may be evaluated in a test tube by providing the target sequence, components of a CRISPR complex, including the guide sequence to be tested and a control guide sequence different from the test guide sequence, and comparing binding or rate of cleavage at the target sequence between the test and control guide sequence reactions. Other assays are possible, and will occur to those skilled in the art.

[0130] In a classic CRISPR-Cas system, the degree of complementarity between a guide sequence and its corresponding target sequence can be about or more than about 50%, 60%, 75%, 80%, 85%, 90%, 95%, 97.5%, 99%, or 100%; a guide or RNA or sgRNA can be about or more than about 5, 10, 11, 12, 13, 14, 15, 16, 17, 18, 19, 20, 21, 22, 23, 24, 25, 26, 27, 28, 29, 30, 35, 40, 45, 50, 75, or more nucleotides in length; or guide or RNA or sgRNA can be less than about 75, 50, 45, 40, 35, 30, 25, 20, 15, 12, or fewer nucleotides in length. However, in certain aspects of the invention, off-target interactions may be reduced, e.g., reduce the guide interacting with a target sequence having low complementarity. Indeed, certain mutations may result in the CRISPR-Cas system being able to distinguish between target and off-target sequences that have greater than 80% to about 95% complementarity, e.g., 83%-84% or 88-89% or 94-95% complementarity (for instance, distinguishing between a target having 18 nucleotides from an off-target of 18 nucleotides having 1, 2 or 3 mismatches). Accordingly, in the context of the present invention the degree of complementarity between a guide sequence and its corresponding target sequence may be greater than 94.5% or 95% or 95.5% or 96% or 96.5% or 97% or 97.5% or 98% or 98.5% or 99% or 99.5% or 99.9%, or 100%. Off target is less than 100% or 99.9% or 99.5% or 99% or 99% or 98.5% or 98% or 97.5% or 97% or 96.5% or 96% or 95.5% or 95% or 94.5% or 94% or 93% or 92% or 91% or 90% or 89% or 88% or 87% or 86% or 85% or 84% or 83% or 82% or 81% or 80% complementarity between the sequence and the guide, with it advantageous that off target is 100% or 99.9% or 99.5% or 99% or 99% or 98.5% or 98% or 97.5% or 97% or 96.5% or 96% or 95.5% or 95% or 94.5% complementarity between the sequence and the guide.

[0131] In certain embodiments, modulations of cleavage efficiency can be exploited by introduction of mismatches, e.g. 1 or more mismatches, such as 1 or 2 mismatches between spacer sequence and target sequence, including the position of the mismatch along the spacer/target. The more central (i.e. not 3′ or 5′) for instance a double mismatch is, the more cleavage efficiency is affected. Accordingly, by chosing mismatch position along the spacer, cleavage efficiency can be modulated. By means of example, if less than 100% cleavage of targets is desired (e.g. in a cell population), 1 or more, such as preferably 2 mismatches between spacer and target sequence may be introduced in the spacer sequences. The more central along the spacer of the mismatch position, the lower the cleavage percentage.

[0132] The methods according to the invention as described herein comprehend inducing one or more nucleotide modifications in a eukaryotic cell (in vitro, i.e. in an isolated eukaryotic cell) as herein discussed comprising delivering to cell a vector as herein discussed. The mutation(s) can include the introduction, deletion, or substitution of one or more nucleotides at each target sequence of cell(s) via the guide(s) RNA(s) or sgRNA(s). The mutations can include the introduction, deletion, or substitution of 1-75 nucleotides at each target sequence of said cell(s) via the guide(s) RNA(s). The mutations can include the introduction, deletion, or substitution of 1, 5, 10, 11, 12, 13, 14, 15, 16, 17, 18, 19, 20, 21, 22, 23, 24, 25, 26, 27, 28, 29, 30, 35, 40, 45, 50, or 75 nucleotides at each target sequence of said cell(s) via the guide(s) RNA(s). The mutations can include the introduction, deletion, or substitution of 5, 10, 11, 12, 13, 14, 15, 16, 17, 18, 19, 20, 21, 22, 23, 24, 25, 26, 27, 28, 29, 30, 35, 40, 45, 50, or 75 nucleotides at each target sequence of said cell(s) via the guide(s) RNA(s). The mutations include the introduction, deletion, or substitution of 10, 11, 12, 13, 14, 15, 16, 17, 18, 19, 20, 21, 22, 23, 24, 25, 26, 27, 28, 29, 30, 35, 40, 45, 50, or 75 nucleotides at each target sequence of said cell(s) via the guide(s) RNA(s). The mutations can include the introduction, deletion, or substitution of 20, 21, 22, 23, 24, 25, 26, 27, 28, 29, 30, 35, 40, 45, 50, or 75 nucleotides at each target sequence of said cell(s) via the guide(s) RNA(s). The mutations can include the introduction, deletion, or substitution of 40, 45, 50, 75, 100, 200, 300, 400 or 500 nucleotides at each target sequence of said cell(s) via the guide(s) RNA(s).

[0133] For minimization of toxicity and off-target effect, it will be important to control the concentration of Cas mRNA or protein and guide RNA delivered. Optimal concentrations of Cas mRNA or protein and guide RNA can be determined by testing different concentrations in a cellular or non-human eukaryote animal model and using deep sequencing the analyze the extent of modification at potential off-target genomic loci.

[0134] Typically, in the context of an endogenous CRISPR system, formation of a CRISPR complex (comprising a guide sequence hybridized to a target sequence and complexed with one or more Cas proteins) results in cleavage in or near (e.g. within 1, 2, 3, 4, 5, 6, 7, 8, 9, 10, 20, 50, or more base pairs from) the target sequence, but may depend on for instance secondary structure, in particular in the case of RNA targets.

[0135] The nucleic acid molecule encoding a Cas is advantageously codon optimized Cas. An example of a codon optimized sequence, is in this instance a sequence optimized for expression in a eukaryote, e.g., humans (i.e. being optimized for expression in humans), or for another eukaryote, animal or mammal as herein discussed; see, e.g., SaCas9 human codon optimized sequence in WO 2014/093622 (PCT/US2013/074667). Whilst this is preferred, it will be appreciated that other examples are possible and codon optimization for a host species other than human, or for codon optimization for specific organs is known. In some embodiments, an enzyme coding sequence encoding a Cas is codon optimized for expression in particular cells, such as eukaryotic cells. The eukaryotic cells may be those of or derived from a particular organism, such as a mammal, including but not limited to human, or non-human eukaryote or animal or mammal as herein discussed, e.g., mouse, rat, rabbit, dog, livestock, or non-human mammal or primate. In some embodiments, processes for modifying the germ line genetic identity of human beings and/or processes for modifying the genetic identity of animals which are likely to cause them suffering without any substantial medical benefit to man or animal, and also animals resulting from such processes, may be excluded. In general, codon optimization refers to a process of modifying a nucleic acid sequence for enhanced expression in the host cells of interest by replacing at least one codon (e.g. about or more than about 1, 2, 3, 4, 5, 10, 15, 20, 25, 50, or more codons) of the native sequence with codons that are more frequently or most frequently used in the genes of that host cell while maintaining the native amino acid sequence. Various species exhibit particular bias for certain codons of a particular amino acid. Codon bias (differences in codon usage between organisms) often correlates with the efficiency of translation of messenger RNA (mRNA), which is in turn believed to be dependent on, among other things, the properties of the codons being translated and the availability of particular transfer RNA (tRNA) molecules. The predominance of selected tRNAs in a cell is generally a reflection of the codons used most frequently in peptide synthesis. Accordingly, genes can be tailored for optimal gene expression in a given organism based on codon optimization. Codon usage tables are readily available, for example, at the “Codon Usage Database” available at www.kazusa.orjp/codon/and these tables can be adapted in a number of ways. See Nakamura, Y., et al. “Codon usage tabulated from the international DNA sequence databases: status for the year 2000” Nucl. Acids Res. 28:292 (2000). Computer algorithms for codon optimizing a particular sequence for expression in a particular host cell are also available, such as Gene Forge (Aptagen; Jacobus, Pa.), are also available. In some embodiments, one or more codons (e.g. 1, 2, 3, 4, 5, 10, 15, 20, 25, 50, or more, or all codons) in a sequence encoding a Cas correspond to the most frequently used codon for a particular amino acid.

[0136] In certain embodiments, the methods as described herein may comprise providing a Cas transgenic cell in which one or more nucleic acids encoding one or more guide RNAs are provided or introduced operably connected in the cell with a regulatory element comprising a promoter of one or more gene of interest. As used herein, the term “Cas transgenic cell” refers to a cell, such as a eukaryotic cell, in which a Cas gene has been genomically integrated. The nature, type, or origin of the cell are not particularly limiting according to the present invention. Also the way how the Cas transgene is introduced in the cell is may vary and can be any method as is known in the art. In certain embodiments, the Cas transgenic cell is obtained by introducing the Cas transgene in an isolated cell. In certain other embodiments, the Cas transgenic cell is obtained by isolating cells from a Cas transgenic organism. By means of example, and without limitation, the Cas transgenic cell as referred to herein may be derived from a Cas transgenic eukaryote, such as a Cas knock-in eukaryote. Reference is made to WO 2014/093622 (PCT/US13/74667), incorporated herein by reference. Methods of US Patent Publication Nos. 20120017290 and 20110265198 assigned to Sangamo BioSciences, Inc. directed to targeting the Rosa locus may be modified to utilize the CRISPR Cas system of the present invention. Methods of US Patent Publication No. 20130236946 assigned to Cellectis directed to targeting the Rosa locus may also be modified to utilize the CRISPR Cas system of the present invention. By means of further example reference is made to Platt et. al. (Cell; 159(2):440-455 (2014)), describing a Cas9 knock-in mouse, which is incorporated herein by reference. The Cas transgene can further comprise a Lox-Stop-polyA-Lox(LSL) cassette thereby rendering Cas expression inducible by Cre recombinase. Alternatively, the Cas transgenic cell may be obtained by introducing the Cas transgene in an isolated cell. Delivery systems for transgenes are well known in the art. By means of example, the Cas transgene may be delivered in for instance eukaryotic cell by means of vector (e.g., AAV, adenovirus, lentivirus) and/or particle and/or nanoparticle delivery, as also described herein elsewhere.

[0137] It will be understood by the skilled person that the cell, such as the Cas transgenic cell, as referred to herein may comprise further genomic alterations besides having an integrated Cas gene or the mutations arising from the sequence specific action of Cas when complexed with RNA capable of guiding Cas to a target locus, such as for instance one or more oncogenic mutations, as for instance and without limitation described in Platt et al. (2014), Chen et al., (2014) or Kumar et al. (2009).

[0138] In some embodiments, the Cas sequence is fused to one or more nuclear localization sequences (NLSs) or nuclear export signals (NESs), such as about or more than about 1, 2, 3, 4, 5, 6, 7, 8, 9, 10, or more NLSs or NESs. In some embodiments, the Cas comprises about or more than about 1, 2, 3, 4, 5, 6, 7, 8, 9, 10, or more NLSs or NESs at or near the amino-terminus, about or more than about 1, 2, 3, 4, 5, 6, 7, 8, 9, 10, or more NLSs or NESs at or near the carboxy-terminus, or a combination of these (e.g. zero or at least one or more NLS or NES at the amino-terminus and zero or at one or more NLS or NES at the carboxy terminus). When more than one NLS or NES is present, each may be selected independently of the others, such that a single NLS or NES may be present in more than one copy and/or in combination with one or more other NLSs or NESs present in one or more copies. In a preferred embodiment of the invention, the Cas comprises at most 6 NLSs. In some embodiments, an NLS or NES is considered near the N- or C-terminus when the nearest amino acid of the NLS or NES is within about 1, 2, 3, 4, 5, 10, 15, 20, 25, 30, 40, 50, or more amino acids along the polypeptide chain from the N- or C-terminus. Non-limiting examples of NLSs include an NLS sequence derived from: the NLS of the SV40 virus large T-antigen, having the amino acid sequence PKKKRKV (SEQ ID NO: 100); the NLS from nucleoplasmin (e.g. the nucleoplasmin bipartite NLS with the sequence KRPAATKKAGQAKKKK) (SEQ ID NO:101); the c-myc NLS having the amino acid sequence PAAKRVKLD (SEQ ID NO: 102) or RQRRNELKRSP (SEQ ID NO:103); the hRNPA1 M9 NLS having the sequence NQSSNFGPMKGGNFGGRSSGPYGGGGQYFAKPRNQGGY(SEQ ID NO: 104); the sequence RMRIZFKNKGKDTAELRRRRVEVSVELRKAKKDEQILKRRNV (SEQ ID NO: 105) of the IBB domain from importin-alpha; the sequences VSRKRPRP (SEQ ID NO: 106) and PPKKARED (SEQ ID NO: 107) of the myoma T protein; the sequence POPKKKPL (SEQ ID NO: 108) of human p53; the sequence SALIKKKKKMAP (SEQ ID NO: 109) of mouse c-ab1 IV; the sequences DRLRR (SEQ ID NO: 110) and PKQKKRK (SEQ ID NO: 111) of the influenza virus NS1; the sequence RKLKKKIKKL (SEQ ID NO: 112) of the Hepatitis virus delta antigen; the sequence REKKKFLKRR (SEQ ID NO: 113) of the mouse Mx1 protein; the sequence KRKGDEVDGVDEVAKKKSKK (SEQ ID NO: 114) of the human poly(ADP-ribose) polymerase; and the sequence RKCLQAGMNLEARKTKK (SEQ ID NO: 115) of the steroid hormone receptors (human) glucocorticoid. Non-limiting examples of NESs include an NES sequence LYPERLRRILT (SEQ ID NO: 116) (ctgtaccctgagcggctgcggcggatcctgacc (SEQ ID NO: 117)). In general, the one or more NLSs or NESs are of sufficient strength to drive accumulation of the Cas in a detectable amount in respectively the nucleus or the cytoplasm of a eukaryotic cell. In general, strength of nuclear localization/export activity may derive from the number of NLSs/NESs in the Cas, the particular NLS(s) or NES(s) used, or a combination of these factors. Detection of accumulation in the nucleus/cytoplasm may be performed by any suitable technique. For example, a detectable marker may be fused to the Cas, such that location within a cell may be visualized, such as in combination with a means for detecting the location of the nucleus (e.g. a stain specific for the nucleus such as DAPI) or cytoplasm. Cell nuclei may also be isolated from cells, the contents of which may then be analyzed by any suitable process for detecting protein, such as immunohistochemistry, Western blot, or enzyme activity assay. Accumulation in the nucleus may also be determined indirectly, such as by an assay for the effect of CRISPR complex formation (e.g. assay for DNA cleavage or mutation at the target sequence, or assay for altered gene expression activity affected by CRISPR complex formation and/or Cas enzyme activity), as compared to a control no exposed to the Cas or complex, or exposed to a Cas lacking the one or more NLSs or NESs. In certain embodiments, other localization tags may be fused to the Cas protein, such as without limitation for localizing the Cas to particular sites in a cell, such as organells, such mitochondria, plastids, chloroplast, vesicles, golgi, (nuclear or cellular) membranes, ribosomes, nucleoluse, ER, cytoskeleton, vacuoles, centrosome, nucleosome, granules, centrioles, etc.

[0139] In certain aspects the invention involves vectors, e.g. for delivering or introducing in a cell Cas and/or RNA capable of guiding Cas to a target locus (i.e. guide RNA), but also for propagating these components (e.g. in prokaryotic cells). A used herein, a “vector” is a tool that allows or facilitates the transfer of an entity from one environment to another. It is a replicon, such as a plasmid, phage, or cosmid, into which another DNA segment may be inserted so as to bring about the replication of the inserted segment. Generally, a vector is capable of replication when associated with the proper control elements. In general, the term “vector” refers to a nucleic acid molecule capable of transporting another nucleic acid to which it has been linked. Vectors include, but are not limited to, nucleic acid molecules that are single-stranded, double-stranded, or partially double-stranded; nucleic acid molecules that comprise one or more free ends, no free ends (e.g. circular); nucleic acid molecules that comprise DNA, RNA, or both; and other varieties of polynucleotides known in the art. One type of vector is a “plasmid,” which refers to a circular double stranded DNA loop into which additional DNA segments can be inserted, such as by standard molecular cloning techniques. Another type of vector is a viral vector, wherein virally-derived DNA or RNA sequences are present in the vector for packaging into a virus (e.g. retroviruses, replication defective retroviruses, adenoviruses, replication defective adenoviruses, and adeno-associated viruses (AAVs)). Viral vectors also include polynucleotides carried by a virus for transfection into a host cell. Certain vectors are capable of autonomous replication in a host cell into which they are introduced (e.g. bacterial vectors having a bacterial origin of replication and episomal mammalian vectors). Other vectors (e.g., non-episomal mammalian vectors) are integrated into the genome of a host cell upon introduction into the host cell, and thereby are replicated along with the host genome. Moreover, certain vectors are capable of directing the expression of genes to which they are operatively-linked. Such vectors are referred to herein as “expression vectors.” Common expression vectors of utility in recombinant DNA techniques are often in the form of plasmids.

[0140] Recombinant expression vectors can comprise a nucleic acid of the invention in a form suitable for expression of the nucleic acid in a host cell, which means that the recombinant expression vectors include one or more regulatory elements, which may be selected on the basis of the host cells to be used for expression, that is operatively-linked to the nucleic acid sequence to be expressed. Within a recombinant expression vector, “operably linked” is intended to mean that the nucleotide sequence of interest is linked to the regulatory element(s) in a manner that allows for expression of the nucleotide sequence (e.g. in an in vitro transcription/translation system or in a host cell when the vector is introduced into the host cell). With regards to recombination and cloning methods, mention is made of U.S. patent application Ser. No. 10/815,730, published Sep. 2, 2004 as US 2004-0171156 A1, the contents of which are herein incorporated by reference in their entirety.

[0141] The vector(s) can include the regulatory element(s), e.g., promoter(s). The vector(s) can comprise Cas encoding sequences, and/or a single, but possibly also can comprise at least 3 or 8 or 16 or 32 or 48 or 50 guide RNA(s) (e.g., sgRNAs) encoding sequences, such as 1-2, 1-3, 1-4 1-5, 3-6, 3-7, 3-8, 3-9, 3-10, 3-8, 3-16, 3-30, 3-32, 3-48, 3-50 RNA(s) (e.g., sgRNAs). In a single vector there can be a promoter for each RNA (e.g., sgRNA), advantageously when there are up to about 16 RNA(s); and, when a single vector provides for more than 16 RNA(s), one or more promoter(s) can drive expression of more than one of the RNA(s), e.g., when there are 32 RNA(s), each promoter can drive expression of two RNA(s), and when there are 48 RNA(s), each promoter can drive expression of three RNA(s). By simple arithmetic and well established cloning protocols and the teachings in this disclosure one skilled in the art can readily practice the invention as to the RNA(s) for a suitable exemplary vector such as AAV, and a suitable promoter such as the U6 promoter. For example, the packaging limit of AAV is ˜4.7 kb. The length of a single U6-gRNA (plus restriction sites for cloning) is 361 bp. Therefore, the skilled person can readily fit about 12-16, e.g., 13 U6-gRNA cassettes in a single vector. This can be assembled by any suitable means, such as a golden gate strategy used for TALE assembly (http://www.genome-engineering.org/taleffectors/). The skilled person can also use a tandem guide strategy to increase the number of U6-gRNAs by approximately 1.5 times, e.g., to increase from 12-16, e.g., 13 to approximately 18-24, e.g., about 19 U6-gRNAs. Therefore, one skilled in the art can readily reach approximately 18-24, e.g., about 19 promoter-RNAs, e.g., U6-gRNAs in a single vector, e.g., an AAV vector. A further means for increasing the number of promoters and RNAs in a vector is to use a single promoter (e.g., U6) to express an array of RNAs separated by cleavable sequences. And an even further means for increasing the number of promoter-RNAs in a vector, is to express an array of promoter-RNAs separated by cleavable sequences in the intron of a coding sequence or gene; and, in this instance it is advantageous to use a polymerase II promoter, which can have increased expression and enable the transcription of long RNA in a tissue specific manner. (see, e.g., http://nar.oxfordjournals.org/content/34/7/e53.short, http://www.nature.com/mt/journal/v16/n9/abs/mt2008144a.html). In an advantageous embodiment, AAV may package U6 tandem gRNA targeting up to about 50 genes. Accordingly, from the knowledge in the art and the teachings in this disclosure the skilled person can readily make and use vector(s), e.g., a single vector, expressing multiple RNAs or guides under the control or operatively or functionally linked to one or more promoters—especially as to the numbers of RNAs or guides discussed herein, without any undue experimentation.

[0142] The guide RNA(s) encoding sequences and/or Cas encoding sequences, can be functionally or operatively linked to regulatory element(s) and hence the regulatory element(s) drive expression. The promoter(s) can be constitutive promoter(s) and/or conditional promoter(s) and/or inducible promoter(s) and/or tissue specific promoter(s). The promoter can be selected from the group consisting of RNA polymerases, pol I, pol II, pol III, T7, U6, H1, retroviral Rous sarcoma virus (RSV) LTR promoter, the cytomegalovirus (CMV) promoter, the SV40 promoter, the dihydrofolate reductase promoter, the β-actin promoter, the phosphoglycerol kinase (PGK) promoter, and the EF1α promoter. An advantageous promoter is the promoter is U6.

[0143] Aspects of the invention relate to the identification and engineering of novel effector proteins associated with Class 2 CRISPR-Cas systems. In a preferred embodiment, the effector protein comprises a single-subunit effector module. In a further embodiment the effector protein is functional in prokaryotic or eukaryotic cells for in vitro, in vivo or ex vivo applications.

[0144] The term “nucleic acid-targeting system”, wherein nucleic acid is DNA or RNA, and in some aspects may also refer to DNA-RNA hybrids or derivatives thereof, refers collectively to transcripts and other elements involved in the expression of or directing the activity of DNA or RNA-targeting CRISPR-associated (“Cas”) genes, which may include sequences encoding a DNA or RNA-targeting Cas protein and a DNA or RNA-targeting guide RNA comprising a CRISPR RNA (crRNA) sequence and (in some but not all systems) a trans-activating CRISPR/Cas system RNA (tracrRNA) sequence, or other sequences and transcripts from a DNA or RNA-targeting CRISPR locus. In general, a RNA-targeting system is characterized by elements that promote the formation of a DNA or RNA-targeting complex at the site of a target DNA or RNA sequence. In the context of formation of a DNA or RNA-targeting complex, “target sequence” refers to a DNA or RNA sequence to which a DNA or RNA-targeting guide RNA is designed to have complementarity, where hybridization between a target sequence and a RNA-targeting guide RNA promotes the formation of a RNA-targeting complex. In some embodiments, a target sequence is located in the nucleus or cytoplasm of a cell.

[0145] In an aspect of the invention, novel RNA targeting systems also referred to as RNA- or RNA-targeting CRISPR/Cas or the CRISPR-Cas system RNA-targeting system of the present application are based on identified Type VI-B Cas proteins which do not require the generation of customized proteins to target specific RNA sequences but rather a single enzyme can be programmed by a RNA molecule to recognize a specific RNA target, in other words the enzyme can be recruited to a specific RNA target using said RNA molecule.

[0146] In an aspect of the invention, novel DNA targeting systems also referred to as DNA- or DNA-targeting CRISPR/Cas or the CRISPR-Cas system RNA-targeting system of the present application are based on identified Type VI-B Cas proteins which do not require the generation of customized proteins to target specific RNA sequences but rather a single enzyme can be programmed by a RNA molecule to recognize a specific DNA target, in other words the enzyme can be recruited to a specific DNA target using said RNA molecule.

[0147] The nucleic acids-targeting systems, the vector systems, the vectors and the compositions described herein may be used in various nucleic acids-targeting applications, altering or modifying synthesis of a gene product, such as a protein, nucleic acids cleavage, nucleic acids editing, nucleic acids splicing; trafficking of target nucleic acids, tracing of target nucleic acids, isolation of target nucleic acids, visualization of target nucleic acids, etc.

[0148] As used herein, a Cas protein or a CRISPR enzyme refers to any of the proteins presented in the new classification of CRISPR-Cas systems.

### Cas13b Nucleases

[0149] The Cas13b effector protein of the invention is, or comprises, or consists essentially of, or consists of, or involves or relates to such a protein from or as set forth in FIG. 1. Preferred proteins of FIG. 1 are selected from the group consisting of Porphyromonas gulae Cas13b (accession number WP_039434803), Prevotella sp. P5-125 Cas13b (accession number WP_044065294), Porphyromonas gingivalis Cas13b (accession number WP_053444417), Porphyromonas sp. COT-052 OH4946 Cas13b (accession number WP_039428968), Bacteroides pyogenes Cas13b (accession number WP_034542281), Riemerella anatipestifer Cas13b (accession number WP_004919755). The most preferred proteins of FIG. 1 are selected from the group consisting of Porphyromonas gulae Cas13b (accession number WP_039434803), Prevotella sp. P5-125 Cas13b (accession number WP_044065294), Porphyromonas gingivalis Cas13b (accession number WP_053444417), Porphyromonas sp. COT-052 OH4946 Cas13b (accession number WP_039428968); and most specifically preferred are Porphyromonas gulae Cas13b (accession number WP_039434803) or Prevotella sp. P5-125 Cas13b (accession number WP_044065294). This invention is intended to provide, or relate to, or involve, or comprise, or consist essentially of, or consist of, a protein from or as set forth herein, including mutations or alterations thereof as set forth herein

[0150] Thus, in some embodiments, the effector protein may be a RNA-binding protein, such as a dead-Cas type effector protein, which may be optionally functionalised as described herein for instance with an transcriptional activator or repressor domain, NLS or other functional domain. In some embodiments, the effector protein may be a RNA-binding protein that cleaves a single strand of RNA. If the RNA bound is ssRNA, then the ssRNA is fully cleaved. In some embodiments, the effector protein may be a RNA-binding protein that cleaves a double strand of RNA, for example if it comprises two RNase domains. If the RNA bound is dsRNA, then the dsRNA is fully cleaved.

[0151] RNase function in CRISPR systems is known, for example mRNA targeting has been reported for certain type III CRISPR-Cas systems (Hale et al., 2014, Genes Dev, vol. 28, 2432-2443; Hale et al., 2009, Cell, vol. 139, 945-956; Peng et al., 2015, Nucleic acids research, vol. 43, 406-417) and provides significant advantages. A CRISPR-Cas system, composition or method targeting RNA via the present effector proteins is thus provided.

[0152] The target RNA, i.e. the RNA of interest, is the RNA to be targeted by the present invention leading to the recruitment to, and the binding of the effector protein at, the target site of interest on the target RNA. The target RNA may be any suitable form of RNA. This may include, in some embodiments, mRNA. In other embodiments, the target RNA may include tRNA or rRNA.

### Cas13b Guide

[0153] As used herein, the term “crRNA” or “guide RNA” or “single guide RNA” or “sgRNA” or “one or more nucleic acid components” of a Type VI CRISPR-Cas locus effector protein comprises any polynucleotide sequence having sufficient complementarity with a target nucleic acid sequence to hybridize with the target nucleic acid sequence and direct sequence-specific binding of a RNA-targeting complex to the target RNA sequence.

[0154] In certain embodiments, the CRISPR system as provided herein can make use of a crRNA or analogous polynucleotide comprising a guide sequence, wherein the polynucleotide is an RNA, a DNA or a mixture of RNA and DNA, and/or wherein the polynucleotide comprises one or more nucleotide analogs. The sequence can comprise any structure, including but not limited to a structure of a native crRNA, such as a bulge, a hairpin or a stem loop structure. In certain embodiments, the polynucleotide comprising the guide sequence forms a duplex with a second polynucleotide sequence which can be an RNA or a DNA sequence.

[0155] In certain embodiments, guides of the invention comprise non-naturally occurring nucleic acids and/or non-naturally occurring nucleotides and/or nucleotide analogs, and/or chemically modifications. Non-naturally occurring nucleic acids can include, for example, mixtures of naturally and non-naturally occurring nucleotides. Non-naturally occurring nucleotides and/or nucleotide analogs may be modified at the ribose, phosphate, and/or base moiety. In an embodiment of the invention, a guide nucleic acid comprises ribonucleotides and non-ribonucleotides. In one such embodiment, a guide comprises one or more ribonucleotides and one or more deoxyribonucleotides. In an embodiment of the invention, the guide comprises one or more non-naturally occurring nucleotide or nucleotide analog such as a nucleotide with phosphorothioate linkage, boranophosphate linkage, a locked nucleic acid (LNA) nucleotides comprising a methylene bridge between the 2′ and 4′ carbons of the ribose ring, or bridged nucleic acids (BNA). Other examples of modified nucleotides include 2′-O-methyl analogs, 2′-deoxy analogs, 2-thiouridine analogs, N6-methyladenosine analogs, or 2′-fluoro analogs. Further examples of modified bases include, but are not limited to, 2-aminopurine, 5-bromo-uridine, pseudouridine (Ψ), N1-methylpseudouridine (me1Ψ), 5-methoxyuridine (5moU), inosine, 7-methylguanosine. Examples of guide RNA chemical modifications include, without limitation, incorporation of 2′-O-methyl (M), 2′-O-methyl 3′phosphorothioate (MS), S-constrained ethyl (cEt), or 2′-O-methyl 3′thioPACE (MSP) at one or more terminal nucleotides. Such chemically modified guide RNAs can comprise increased stability and increased activity as compared to unmodified guide RNAs, though on-target vs. off-target specificity is not predictable. (See, Hendel, 2015, Nat Biotechnol. 33(9):985-9, doi: 10.1038/nbt.3290, published online 29 Jun. 2015; Allerson et al., J. Med. Chem. 2005, 48:901-904; Bramsen et al., Front. Genet., 2012, 3:154; Deng et al., PNAS, 2015, 112:11870-11875; Sharma et al., MedChemComm., 2014, 5:1454-1471; Li et al., Nature Biomedical Engineering, 2017, 1, 0066 DOI:10.1038/s41551-017-0066).

[0156] In some embodiments, the 5′ and/or 3′ end of a guide RNA is modified by a variety of functional moieties including fluorescent dyes, polyethylene glycol, cholesterol, proteins, or detection tags. (See Kelly et al., 2016, J. Biotech. 233:74-83). In certain embodiments, a guide comprises ribonucleotides in a region that binds to a target RNA and one or more deoxyribonucleotides and/or nucleotide analogs in a region that binds to Cas13b. In an embodiment of the invention, deoxyribonucleotides and/or nucleotide analogs are incorporated in engineered guide structures, such as, without limitation, 5′ and/or 3′ end, stem-loop regions, and the seed region. In certain embodiments, the modification is not in the 3′-handle of the stem-loop regions. Chemical modification in the 3′-handle of the stem-loop region of a guide may abolish its function. In certain embodiments, at least 1, 2, 3, 4, 5, 6, 7, 8, 9, 10, 11, 12, 13, 14, 15, 16, 17, 18, 19, 20, 21, 22, 23, 24, 25, 26, 27, 28, 29, 30, 35, 40, 45, 50, or 75 nucleotides of a guide is chemically modified. In some embodiments, 3-5 nucleotides at either the 3′ or the 5′ end of a guide is chemically modified. In some embodiments, only minor modifications are introduced in the seed region, such as 2′-F modifications. In some embodiments, 2′-F modification is introduced at the 5′ and/or the 3′ end of a guide. In certain embodiments, three to five nucleotides at the 5′ and/or the 3′ end of the guide are chemically modified with 2′-O-methyl (M), 2′-O-methyl-3′-phosphorothioate (MS), S-constrained ethyl(cEt), or 2′-O-methyl-3′-thioPACE (MSP). Such modification can enhance genome editing efficiency (see Hendel et al., Nat. Biotechnol. (2015) 33(9): 985-989). In certain embodiments, all of the phosphodiester bonds of a guide are substituted with phosphorothioates (PS) for enhancing levels of gene disruption. In certain embodiments, more than five nucleotides at the 5′ and/or the 3′ end of the guide are chemically modified with 2′-O-Me, 2′-F or S-constrained ethyl(cEt). Such chemically modified guide can mediate enhanced levels of gene disruption (see Ragdarm et al., 0215, PNAS, E7110-E7111). In an embodiment of the invention, a guide is modified to comprise a chemical moiety at its 3′ and/or 5′ end. Such moieties include, but are not limited to amine, azide, alkyne, thio, dibenzocyclooctyne (DBCO), or Rhodamine. In certain embodiment, the chemical moiety is conjugated to the guide by a linker, such as an alkyl chain. In certain embodiments, the chemical moiety of the modified guide can be used to attach the guide to another molecule, such as DNA, RNA, protein, or nanoparticles. Such chemically modified guide can be used to identify or enrich cells generically edited by a CRISPR system (see Lee et al., eLife, 2017, 6:e25312, DOI:10.7554)

[0157] In some embodiments, the modification to the guide is a chemical modification, an insertion, a deletion or a split. In some embodiments, the chemical modification includes, but is not limited to, incorporation of 2′-O-methyl (M) analogs, 2′-deoxy analogs, 2-thiouridine analogs, N6-methyladenosine analogs, 2′-fluoro analogs, 2-aminopurine, 5-bromo-uridine, pseudouridine (T), N1-methylpseudouridine (mePP), 5-methoxyuridine (5moU), inosine, 7-methylguanosine, 2′-O-methyl-3′-phosphorothioate (MS), S-constrained ethyl(cEt), phosphorothioate (PS), or 2′-O-methyl-3′-thioPACE (MSP). In some embodiments, the guide comprises one or more of phosphorothioate modifications. In certain embodiments, at least 1, 2, 3, 4, 5, 6, 7, 8, 9, 10, 11, 12, 13, 14, 15, 16, 17, 18, 19, 20, or 25 nucleotides of the guide are chemically modified. In certain embodiments, one or more nucleotides in the seed region are chemically modified. In certain embodiments, one or more nucleotides in the 5′-terminus are chemically modified. In certain embodiments, none of the nucleotides in the 3′-handle is chemically modified. In some embodiments, the chemical modification in the seed region is a minor modification, such as incorporation of a 2′-fluoro analog. In a specific embodiment, one nucleotide of the seed region is replaced with a 2′-fluoro analog. In some embodiments, 5 or 10 nucleotides in the 5′-terminus are chemically modified. Such chemical modifications at the 5′-terminus of the Cas13b CrRNA may improve gene cutting efficiency. In a specific embodiment, 5 nucleotides in the 5′-terminus are replaced with 2′-fluoro analogues. In a specific embodiment, 10 nucleotides in the 5′-terminus are replaced with 2′-fluoro analogues. In a specific embodiment, 5 nucleotides in the 5′-terminus are replaced with 2′-O-methyl (M) analogs.

[0158] In some embodiments, the loop of the 3′-handle of the guide is modified. In some embodiments, the loop of the 3′-handle of the guide is modified to have a deletion, an insertion, a split, or chemical modifications. In certain embodiments, the loop comprises 3, 4, or 5 nucleotides. In certain embodiments, the loop comprises the sequence of UCUU, UUUU, UAUU, or UGUU.

[0159] In one aspect, the guide comprises portions that are chemically linked or conjugated via a non-phosphodiester bond. In one aspect, the guide comprises, in non-limiting examples, a direct repeat and a targeting sequence portion that are chemically linked or conjugated via a non-nucleotide loop. In some embodiments, the portions are joined via a non-phosphodiester covalent linker. Examples of the covalent linker include but are not limited to a chemical moiety selected from the group consisting of carbamates, ethers, esters, amides, imines, amidines, aminotrizines, hydrozone, disulfides, thioethers, thioesters, phosphorothioates, phosphorodithioates, sulfonamides, sulfonates, fulfones, sulfoxides, ureas, thioureas, hydrazide, oxime, triazole, photolabile linkages, C—C bond forming groups such as Diels-Alder cyclo-addition pairs or ring-closing metathesis pairs, and Michael reaction pairs.

[0160] In some embodiments, portions of the guide are first synthesized using the standard phosphoramidite synthetic protocol (Herdewijn, P., ed., Methods in Molecular Biology Col 288, Oligonucleotide Synthesis: Methods and Applications, Humana Press, New Jersey (2012)). In some embodiments, the non-targeting guide portions can be functionalized to contain an appropriate functional group for ligation using the standard protocol known in the art (Hermanson, G. T., Bioconjugate Techniques, Academic Press (2013)). Examples of functional groups include, but are not limited to, hydroxyl, amine, carboxylic acid, carboxylic acid halide, carboxylic acid active ester, aldehyde, carbonyl, chlorocarbonyl, imidazolylcarbonyl, hydrozide, semicarbazide, thio semicarbazide, thiol, maleimide, haloalkyl, sulfonyl, ally, propargyl, diene, alkyne, and azide. Once a non-targeting portions of a guide is functionalized, a covalent chemical bond or linkage can be formed between the two oligonucleotides. Examples of chemical bonds include, but are not limited to, those based on carbamates, ethers, esters, amides, imines, amidines, aminotrizines, hydrozone, disulfides, thioethers, thioesters, phosphorothioates, phosphorodithioates, sulfonamides, sulfonates, fulfones, sulfoxides, ureas, thioureas, hydrazide, oxime, triazole, photolabile linkages, C—C bond forming groups such as Diels-Alder cyclo-addition pairs or ring-closing metathesis pairs, and Michael reaction pairs.

[0161] In some embodiments, one or more portions of a guide can be chemically synthesized. In some embodiments, the chemical synthesis uses automated, solid-phase oligonucleotide synthesis machines with 2′-acetoxyethyl orthoester (2′-ACE) (Scaringe et al., J. Am. Chem. Soc. (1998) 120: 11820-11821; Scaringe, Methods Enzymol. (2000) 317: 3-18) or 2′-thionocarbamate (2′-TC) chemistry (Dellinger et al., J. Am. Chem. Soc. (2011) 133: 11540-11546; Hendel et al., Nat. Biotechnol. (2015) 33:985-989).

[0162] In some embodiments, the guide portions can be covalently linked using various bioconjugation reactions, loops, bridges, and non-nucleotide links via modifications of sugar, internucleotide phosphodiester bonds, purine and pyrimidine residues. Sletten et al., Angew. Chem. Int. Ed. (2009) 48:6974-6998; Manoharan, M. Curr. Opin. Chem. Biol. (2004) 8: 570-9; Behlke et al., Oligonucleotides (2008) 18: 305-19; Watts, et al., Drug. Discov. Today (2008) 13: 842-55; Shukla, et al., ChemMedChem (2010) 5: 328-49.

[0163] In some embodiments, the guide portions can be covalently linked using click chemistry. In some embodiments, guide portions can be covalently linked using a triazole linker. In some embodiments, guide portions can be covalently linked using Huisgen 1,3-dipolar cycloaddition reaction involving an alkyne and azide to yield a highly stable triazole linker (He et al., ChemBioChem (2015) 17: 1809-1812; WO 2016/186745). In some embodiments, guide portions are covalently linked by ligating a 5′-hexyne portion and a 3′-azide portion. In some embodiments, either or both of the 5′-hexyne guide portion and a 3′-azide guide portion can be protected with 2′-acetoxyethyl orthoester (2′-ACE) group, which can be subsequently removed using Dharmacon protocol (Scaringe et al., J. Am. Chem. Soc. (1998) 120: 11820-11821; Scaringe, Methods Enzymol. (2000) 317: 3-18).

[0164] In some embodiments, guide portions can be covalently linked via a linker (e.g., a non-nucleotide loop) that comprises a moiety such as spacers, attachments, bioconjugates, chromophores, reporter groups, dye labeled RNAs, and non-naturally occurring nucleotide analogues. More specifically, suitable spacers for purposes of this invention include, but are not limited to, polyethers (e.g., polyethylene glycols, polyalcohols, polypropylene glycol or mixtures of ethylene and propylene glycols), polyamines group (e.g., spennine, spermidine and polymeric derivatives thereof), polyesters (e.g., poly(ethyl acrylate)), polyphosphodiesters, alkylenes, and combinations thereof. Suitable attachments include any moiety that can be added to the linker to add additional properties to the linker, such as but not limited to, fluorescent labels. Suitable bioconjugates include, but are not limited to, peptides, glycosides, lipids, cholesterol, phospholipids, diacyl glycerols and dialkyl glycerols, fatty acids, hydrocarbons, enzyme substrates, steroids, biotin, digoxigenin, carbohydrates, polysaccharides. Suitable chromophores, reporter groups, and dye-labeled RNAs include, but are not limited to, fluorescent dyes such as fluorescein and rhodamine, chemiluminescent, electrochemiluminescent, and bioluminescent marker compounds. The design of example linkers conjugating two RNA components are also described in WO 2004/015075.

[0165] The linker (e.g., a non-nucleotide loop) can be of any length. In some embodiments, the linker has a length equivalent to about 0-16 nucleotides. In some embodiments, the linker has a length equivalent to about 0-8 nucleotides. In some embodiments, the linker has a length equivalent to about 0-4 nucleotides. In some embodiments, the linker has a length equivalent to about 2 nucleotides. Example linker design is also described in WO2011/008730.

[0166] In some embodiments, the degree of complementarity, when optimally aligned using a suitable alignment algorithm, is about or more than about 50%, 60%, 75%, 80%, 85%, 90%, 95%, 97.5%, 99%, or more. Optimal alignment may be determined with the use of any suitable algorithm for aligning sequences, non-limiting example of which include the Smith-Waterman algorithm, the Needleman-Wunsch algorithm, algorithms based on the Burrows-Wheeler Transform (e.g., the Burrows Wheeler Aligner), ClustalW, Clustal X, BLAT, Novoalign (Novocraft Technologies; available at www.novocraft.com), ELAND (Illumina, San Diego, Calif.), SOAP (available at soap.genomics.org.cn), and Maq (available at maq.sourceforge.net). The ability of a guide sequence (within a RNA-targeting guide RNA or crRNA) to direct sequence-specific binding of a nucleic acid-targeting complex to a target nucleic acid sequence may be assessed by any suitable assay. For example, the components of a RNA-targeting CRISPR Cas13b system sufficient to form a nucleic acid-targeting complex, including the guide sequence to be tested, may be provided to a host cell having the corresponding target nucleic acid sequence, such as by transfection with vectors encoding the components of the nucleic acid-targeting complex, followed by an assessment of preferential targeting (e.g., cleavage) within the target nucleic acid sequence, such as by Surveyor assay as described herein. Similarly, cleavage of a target nucleic acid sequence may be evaluated in a test tube by providing the target nucleic acid sequence, components of a nucleic acid-targeting complex, including the guide sequence to be tested and a control guide sequence different from the test guide sequence, and comparing binding or rate of cleavage at the target sequence between the test and control guide sequence reactions. Other assays are possible, and will occur to those skilled in the art. A guide sequence, and hence a RNA-targeting guide RNA or crRNA may be selected to target any target nucleic acid sequence. The target sequence may be DNA. The target sequence may be any RNA sequence. In some embodiments, the target sequence may be a sequence within a RNA molecule selected from the group consisting of messenger RNA (mRNA), pre-mRNA, ribosomal RNA (rRNA), transfer RNA (tRNA), micro-RNA (miRNA), small interfering RNA (siRNA), small nuclear RNA (snRNA), small nucleolar RNA (snoRNA), double stranded RNA (dsRNA), non coding RNA (ncRNA), long non-coding RNA (lncRNA), and small cytoplasmatic RNA (scRNA). In some preferred embodiments, the target sequence may be a sequence within a RNA molecule selected from the group consisting of mRNA, pre-mRNA, and rRNA. In some preferred embodiments, the target sequence may be a sequence within a RNA molecule selected from the group consisting of ncRNA, and lncRNA. In some more preferred embodiments, the target sequence may be a sequence within an mRNA molecule or a pre-mRNA molecule.

[0167] In some embodiments, a RNA-targeting guide RNA or crRNA is selected to reduce the degree secondary structure within the RNA-targeting guide RNA or crRNA. In some embodiments, about or less than about 75%, 50%, 40%, 30%, 25%, 20%, 15%, 10%, 5%, 1%, or fewer of the nucleotides of the RNA-targeting guide RNA participate in self-complementary base pairing when optimally folded. Optimal folding may be determined by any suitable polynucleotide folding algorithm. Some programs are based on calculating the minimal Gibbs free energy. An example of one such algorithm is mFold, as described by Zuker and Stiegler (Nucleic Acids Res. 9 (1981), 133-148). Another example folding algorithm is the online webserver RNAfold, developed at Institute for Theoretical Chemistry at the University of Vienna, using the centroid structure prediction algorithm (see e.g., A. R. Gruber et al., 2008, Cell 106(1): 23-24; and PA Carr and GM Church, 2009, Nature Biotechnology 27(12): 1151-62).

[0168] In certain embodiments, a guide RNA or crRNA may comprise, consist essentially of, or consist of a direct repeat (DR) sequence and a guide sequence or spacer sequence. In certain embodiments, the guide RNA or crRNA may comprise, consist essentially of, or consist of a direct repeat sequence fused or linked to a guide sequence or spacer sequence. In certain embodiments, the direct repeat sequence may be located upstream (i.e., 5′) from the guide sequence or spacer sequence. In other embodiments, the direct repeat sequence may be located downstream (i.e., 3′) from the guide sequence or spacer sequence. In other embodiments, multiple DRs (such as dual DRs) may be present.

[0169] In certain embodiments, the crRNA comprises a stem loop, preferably a single stem loop. In certain embodiments, the direct repeat sequence forms a stem loop, preferably a single stem loop.

[0170] In certain embodiments, the spacer length of the guide RNA is from 15 to 35 nt. In certain embodiments, the spacer length of the guide RNA is at least 15 nucleotides. In certain embodiments, the spacer length is from 15 to 17 nt, e.g., 15, 16, or 17 nt, from 17 to 20 nt, e.g., 17, 18, 19, or 20 nt, from 20 to 24 nt, e.g., 20, 21, 22, 23, or 24 nt, from 23 to 25 nt, e.g., 23, 24, or 25 nt, from 24 to 27 nt, e.g., 24, 25, 26, or 27 nt, from 27-30 nt, e.g., 27, 28, 29, or 30 nt, from 30-35 nt, e.g., 30, 31, 32, 33, 34, or 35 nt, or 35 nt or longer.

Interfering RNA (RNAi) and microRNA (miRNA)

[0171] In other embodiments, the target RNA may include interfering RNA, i.e. RNA involved in an RNA interference pathway, such as shRNA, siRNA and so forth, both in eukaryotes and prokaryotes. In other embodiments, the target RNA may include microRNA (miRNA). Control over interfering RNA or miRNA may help reduce off-target effects (OTE) seen with those approaches by reducing the longevity of the interfering RNA or miRNA in vivo or in vitro.

[0172] In certain embodiments, the target is not the miRNA itself, but the miRNA binding site of a miRNA target.

[0173] In certain embodiments, miRNAs may be sequestered (such as including subcellularly relocated). In certain embodiments, miRNAs may be cut, such as without limitation at hairpins.

[0174] In certain embodiments, miRNA processing (such as including turnover) is increased or decreased.

[0175] If the effector protein and suitable guide are selectively expressed (for example spatially or temporally under the control of a suitable promoter, for example a tissue- or cell cycle-specific promoter and/or enhancer) then this could be used to ‘protect’ the cells or systems (in vivo or in vitro) from RNAi in those cells. This may be useful in neighbouring tissues or cells where RNAi is not required or for the purposes of comparison of the cells or tissues where the effector protein and suitable guide are and are not expressed (i.e. where the RNAi is not controlled and where it is, respectively). The effector protein may be used to control or bind to molecules comprising or consisting of RNA, such as ribozymes, ribosomes or riboswitches. In embodiments of the invention, the RNA guide can recruit the effector protein to these molecules so that the effector protein is able to bind to them.

[0176] The protein system of the invention can be applied in areas of RNAi technologies, without undue experimentation, from this disclosure, including therapeutic, assay and other applications (see, e.g., Guidi et al., PLoS Negl Trop Dis 9(5): e0003801. doi:10.1371/journal.pntd; Crotty et al., In vivo RNAi screens: concepts and applications. Shane Crotty . . . 2015 Elsevier Ltd. Published by Elsevier Inc., Pesticide Biochemistry and Physiology (Impact Factor: 2.01). 01/2015; 120. DOI: 10.1016/j.pestbp.2015.01.002 and Makkonen et al., Viruses 2015, 7(4), 2099-2125; doi:10.3390/v7042099), because the present application provides the foundation for informed engineering of the system.

Ribosomal RNA (rRNA)

[0177] For example, azalide antibiotics such as azithromycin, are well known. They target and disrupt the 505 ribosomal subunit. The present effector protein, together with a suitable guide RNA to target the 505 ribosomal subunit, may be, in some embodiments, recruited to and bind to the 505 ribosomal subunit. Thus, the present effector protein in concert with a suitable guide directed at a ribosomal (especially the 50s ribosomal subunit) target is provided. Use of this use effector protein in concert with the suitable guide directed at the ribosomal (especially the 50s ribosomal subunit) target may include antibiotic use. In particular, the antibiotic use is analogous to the action of azalide antibiotics, such as azithromycin. In some embodiments, prokaryotic ribosomal subunits, such as the 70S subunit in prokaryotes, the 505 subunit mentioned above, the 30S subunit, as well as the 16S and 5S subunits may be targeted. In other embodiments, eukaryotic ribosomal subunits, such as the 80S subunit in eukaryotes, the 60S subunit, the 40S subunit, as well as the 28S, 18S. 5.8S and 5S subunits may be targeted.

[0178] In some embodiments, the effector protein may be a RNA-binding protein, optionally functionalized, as described herein. In some embodiments, the effector protein may be a RNA-binding protein that cleaves a single strand of RNA. In either case, but particularly where the RNA-binding protein cleaves a single strand of RNA, then ribosomal function may be modulated and, in particular, reduced or destroyed. This may apply to any ribosomal RNA and any ribosomal subunit and the sequences of rRNA are well known.

[0179] Control of ribosomal activity is thus envisaged through use of the present effector protein in concert with a suitable guide to the ribosomal target. This may be through cleavage of, or binding to, the ribosome. In particular, reduction of ribosomal activity is envisaged. This may be useful in assaying ribosomal function in vivo or in vitro, but also as a means of controlling therapies based on ribosomal activity, in vivo or in vitro. Furthermore, control (i.e. reduction) of protein synthesis in an in vivo or in vitro system is envisaged, such control including antibiotic and research and diagnostic use.

### Riboswitches

[0180] A riboswitch (also known as an aptozyme) is a regulatory segment of a messenger RNA molecule that binds a small molecule. This typically results in a change in production of the proteins encoded by the mRNA. Thus, control of riboswitch activity is thus envisaged through use of the present effector protein in concert with a suitable guide to the riboswitch target. This may be through cleavage of, or binding to, the riboswitch. In particular, reduction of riboswitch activity is envisaged. This may be useful in assaying riboswitch function in vivo or in vitro, but also as a means of controlling therapies based on riboswitch activity, in vivo or in vitro. Furthermore, control (i.e. reduction) of protein synthesis in an in vivo or in vitro system is envisaged. This control, as for rRNA may include antibiotic and research and diagnostic use.

### Ribozymes

[0181] Ribozymes are RNA molecules having catalytic properties, analogous to enzymes (which are of course proteins). As ribozymes, both naturally occurring and engineered, comprise or consist of RNA, they may also be targeted by the present RNA-binding effector protein. In some embodiments, the effector protein may be a RNA-binding protein cleaves the ribozyme to thereby disable it. Control of ribozymal activity is thus envisaged through use of the present effector protein in concert with a suitable guide to the ribozymal target. This may be through cleavage of, or binding to, the ribozyme. In particular, reduction of ribozymal activity is envisaged. This may be useful in assaying ribozymal function in vivo or in vitro, but also as a means of controlling therapies based on ribozymal activity, in vivo or in vitro.

### Gene Expression, Including RNA Processing

[0182] The effector protein may also be used, together with a suitable guide, to target gene expression, including via control of RNA processing. The control of RNA processing may include RNA processing reactions such as RNA splicing, including alternative splicing, via targeting of RNApol; viral replication (in particular of satellite viruses, bacteriophages and retroviruses, such as HBV, HBC and HIV and others listed herein) including virioids in plants; and tRNA biosynthesis. The effector protein and suitable guide may also be used to control RNAactivation (RNAa). RNAa leads to the promotion of gene expression, so control of gene expression may be achieved that way through disruption or reduction of RNAa and thus less promotion of gene expression. This is discussed more in detail below.

### RNAi Screens

[0183] Identifying gene products whose knockdown is associated with phenotypic changes, biological pathways can be interrogated and the constituent parts identified, via RNAi screens. Control may also be exerted over or during these screens by use of the effector protein and suitable guide to remove or reduce the activity of the RNAi in the screen and thus reinstate the activity of the (previously interfered with) gene product (by removing or reducing the interference/repression).

[0184] Satellite RNAs (satRNAs) and satellite viruses may also be treated.

[0185] Control herein with reference to RNase activity generally means reduction, negative disruption or known-down or knock out.

### In Vivo RNA Applications

### Inhibition of Gene Expression

[0186] The target-specific RNAses provided herein allow for very specific cutting of a target RNA. The interference at RNA level allows for modulation both spatially and temporally and in a non-invasive way, as the genome is not modified.

[0187] A number of diseases have been demonstrated to be treatable by mRNA targeting. While most of these studies relate to administration of siRNA, it is clear that the RNA targeting effector proteins provided herein can be applied in a similar way.

[0188] Examples of mRNA targets (and corresponding disease treatments) are VEGF, VEGF-R1 and RTP801 (in the treatment of AMD and/or DME), Caspase 2 (in the treatment of Naion) ADRB2 (in the treatment of intraocular pressure), TRPVI (in the treatment of Dry eye syndrome, Syk kinase (in the treatment of asthma), Apo B (in the treatment of hypercholesterolemia or hypobetalipoproteinemia), PLK1, KSP and VEGF (in the treatment of solid tumors), Ber-Abl (in the treatment of CML)(Burnett and Rossi Chem Biol. 2012, 19(1): 60-71)). Similarly, RNA targeting has been demonstrated to be effective in the treatment of RNA-virus mediated diseases such as HIV (targeting of HIV Tet and Rev), RSV (targeting of RSV nucleocapsid) and HCV (targeting of miR-122) (Burnett and Rossi Chem Biol. 2012, 19(1): 60-71).

[0189] It is further envisaged that the RNA targeting effector protein of the invention can be used for mutation specific or allele specific knockdown. Guide RNA's can be designed that specifically target a sequence in the transcribed mRNA comprising a mutation or an allele-specific sequence. Such specific knockdown is particularly suitable for therapeutic applications relating to disorders associated with mutated or allele-specific gene products. For example, most cases of familial hypobetalipoproteinemia (FHBL) are caused by mutations in the ApoB gene. This gene encodes two versions of the apolipoprotein B protein: a short version (ApoB-48) and a longer version (ApoB-100). Several ApoB gene mutations that lead to FHBL cause both versions of ApoB to be abnormally short. Specifically targeting and knockdown of mutated ApoB mRNA transcripts with an RNA targeting effector protein of the invention may be beneficial in treatment of FHBL. As another example, Huntington's disease (HD) is caused by an expansion of CAG triplet repeats in the gene coding for the Huntingtin protein, which results in an abnormal protein. Specifically targeting and knockdown of mutated or allele-specific mRNA transcripts encoding the Huntingtin protein with an RNA targeting effector protein of the invention may be beneficial in treatment of HD.

[0190] It is noted that in this context, and more generally fort he various applications as described herein, the use of a split version of the RNA targeting effector protein can be envisaged. Indeed, this may not only allow increased specificity but may also be advantageous for delivery. The Cas13b is split in the sense that the two parts of the Cas13b enzyme substantially comprise a functioning Cas13b. Ideally, the split should always be so that the catalytic domain(s) are unaffected. That Cas13b may function as a nuclease or it may be a dead-Cas13b which is essentially an RNA-binding protein with very little or no catalytic activity, due to typically mutation(s) in its catalytic domains.

[0191] Each half of the split Cas13b may be fused to a dimerization partner. By means of example, and without limitation, employing rapamycin sensitive dimerization domains, allows to generate a chemically inducible split Cas13b for temporal control of Cas13b activity. Cas13b can thus be rendered chemically inducible by being split into two fragments and that rapamycin-sensitive dimerization domains may be used for controlled reassembly of the Cas13b. The two parts of the split Cas13b can be thought of as the N′ terminal part and the C′ terminal part of the split Cas13b. The fusion is typically at the split point of the Cas13b. In other words, the C′ terminal of the N′ terminal part of the split Cas13b is fused to one of the dimer halves, whilst the N′ terminal of the C′ terminal part is fused to the other dimer half.

[0192] The Cas13b does not have to be split in the sense that the break is newly created. The split point is typically designed in silico and cloned into the constructs. Together, the two parts of the split Cas13b, the N′ terminal and C′ terminal parts, form a full Cas13b, comprising preferably at least 70% or more of the wildtype amino acids (or nucleotides encoding them), preferably at least 80% or more, preferably at least 90% or more, preferably at least 95% or more, and most preferably at least 99% or more of the wildtype amino acids (or nucleotides encoding them). Some trimming may be possible, and mutants are envisaged. Non-functional domains may be removed entirely. What is important is that the two parts may be brought together and that the desired Cas13b function is restored or reconstituted. The dimer may be a homodimer or a heterodimer.

[0193] In certain embodiments, the Cas13b effector as described herein may be used for mutation-specific, or allele-specific targeting, such as for mutation-specific, or allele-specific knockdown.

[0194] The RNA targeting effector protein can moreover be fused to another functional RNAse domain, such as a non-specific RNase or Argonaute 2, which acts in synergy to increase the RNAse activity or to ensure further degradation of the message.

### Modulation of Gene Expression Through Modulation of RNA Function

[0195] Apart from a direct effect on gene expression through cleavage of the mRNA, RNA targeting can also be used to impact specific aspects of the RNA processing within the cell, which may allow a more subtle modulation of gene expression. Generally, modulation can for instance be mediated by interfering with binding of proteins to the RNA, such as for instance blocking binding of proteins, or recruiting RNA binding proteins. Indeed, modulations can be ensured at different levels such as splicing, transport, localization, translation and turnover of the mRNA. Similarly in the context of therapy, it can be envisaged to address (pathogenic) malfunctioning at each of these levels by using RNA-specific targeting molecules. In these embodiments it is in many cases preferred that the RNA targeting protein is a “dead” Cas13b that has lost the ability to cut the RNA target but maintains its ability to bind thereto, such as the mutated forms of Cas13b described herein.

[0196] A) Alternative Splicing

[0197] Many of the human genes express multiple mRNAs as a result of alternative splicing. Different diseases have been shown to be linked to aberrant splicing leading to loss of function or gain of function of the expressed gene. While some of these diseases are caused by mutations that cause splicing defects, a number of these are not. One therapeutic option is to target the splicing mechanism directly. The RNA targeting effector proteins described herein can for instance be used to block or promote slicing, include or exclude exons and influence the expression of specific isoforms and/or stimulate the expression of alternative protein products. Such applications are described in more detail below.

[0198] A RNA targeting effector protein binding to a target RNA can sterically block access of splicing factors to the RNA sequence. The RNA targeting effector protein targeted to a splice site may block splicing at the site, optionally redirecting splicing to an adjacent site. For instance a RNA targeting effector protein binding to the 5′ splice site binding can block the recruitment of the U1 component of the spliceosome, favoring the skipping of that exon. Alternatively, a RNA targeting effector protein targeted to a splicing enhancer or silencer can prevent binding of transacting regulatory splicing factors at the target site and effectively block or promote splicing. Exon exclusion can further be achieved by recruitment of ILF2/3 to precursor mRNA near an exon by an RNA targeting effector protein as described herein. As yet another example, a glycine rich domain can be attached for recruitment of hnRNP A1 and exon exclusion (Del Gatto-Konczak et al. Mol Cell Biol. 1999 January; 19(1):251-60).

[0199] In certain embodiments, through appropriate selection of gRNA, specific splice variants may be targeted, while other splice variants will not be targeted.

[0200] In some cases the RNA targeting effector protein can be used to promote slicing (e.g. where splicing is defective). For instance a RNA targeting effector protein can be associated with an effector capable of stabilizing a splicing regulatory stem-loop in order to further splicing. The RNA targeting effector protein can be linked to a consensus binding site sequence for a specific splicing factor in order to recruit the protein to the target DNA or RNA.

[0201] Examples of diseases which have been associated with aberrant splicing include, but are not limited to Paraneoplastic Opsoclonus Myoclonus Ataxia (or POMA), resulting from a loss of Nova proteins which regulate splicing of proteins that function in the synapse, and Cystic Fibrosis, which is caused by defective splicing of a cystic fibrosis transmembrane conductance regulator, resulting in the production of nonfunctional chloride channels. In other diseases aberrant RNA splicing results in gain-of-function. This is the case for instance in myotonic dystrophy which is caused by a CUG triplet-repeat expansion (from 50 to >1500 repeats) in the 3′UTR of an mRNA, causing splicing defects.

[0202] The RNA targeting effector protein can be used to include an exon by recruiting a splicing factor (such as U1) to a 5′splicing site to promote excision of introns around a desired exon. Such recruitment could be mediated trough a fusion with an arginine/serine rich domain, which functions as splicing activator (Gravely B R and Maniatis T, Mol Cell. 1998 (5):765-71).

[0203] It is envisaged that the RNA targeting effector protein can be used to block the splicing machinery at a desired locus, resulting in preventing exon recognition and the expression of a different protein product. An example of a disorder that may treated is Duchenne muscular dystrophy (DMD), which is caused by mutations in the gene encoding for the dystrophin protein. Almost all DMD mutations lead to frameshifts, resulting in impaired dystrophin translation. The RNA targeting effector protein can be paired with splice junctions or exonic splicing enhancers (ESEs) thereby preventing exon recognition, resulting in the translation of a partially functional protein. This converts the lethal Duchenne phenotype into the less severe Becker phenotype.

[0204] B) RNA Modification

[0205] RNA editing is a natural process whereby the diversity of gene products of a given sequence is increased by minor modification in the RNA. Typically, the modification involves the conversion of adenosine (A) to inosine (I), resulting in an RNA sequence which is different from that encoded by the genome. RNA modification is generally ensured by the ADAR enzyme, whereby the pre-RNA target forms an imperfect duplex RNA by base-pairing between the exon that contains the adenosine to be edited and an intronic non-coding element. A classic example of A-I editing is the glutamate receptor GluR-B mRNA, whereby the change results in modified conductance properties of the channel (Higuchi M, et al. Cell. 1993; 75:1361-70).

[0206] According to the invention, enzymatic approaches are used to induce transitions (A<->G or C<->U changes) or transversions (any purine to any pyrimidine of vice versa) in the RNA bases of a given transcript. Transitions can be directly induced by using adenosine (ADAR1/2)) or cytosine deaminases (APOBEC, AID) which convert A to I or C to U, respectively. Transversions can be indirectly induced by localizing reactive oxygen species damage to the bases of interest, which causes chemical modifications to be added to the affected bases, such as the conversion of guanine to oxo-guanine. An oxo-gaunine is recognized as a T and will thus base pair with an adenine causing translation to be affected. Proteins that can be recruited for ROS-mediated base damage include APEX and mini-SOG. With both approaches, these effectors can be fused to a catalytically inactive Cas13b and be recruited to sites on transcripts where these types of mutations are desired.

[0207] In humans, a heterozygous functional-null mutation in the ADAR1 gene leads to a skin disease, human pigmentary genodermatosis (Miyamura Y, et al. Am J Hum Genet. 2003; 73:693-9). It is envisaged that the RNA targeting effector proteins of the present invention can be used to correct malfunctioning RNA modification.

[0208] It is further envisaged that RNA adenosine methylase (N(6)-methyladenosine) can be fused to the RNA targeting effector proteins of the invention and targeted to a transcript of interest. This methylase causes reversible methylation, has regulatory roles and may affect gene expression and cell fate decisions by modulating multiple RNA-related cellular pathways (Fu et al Nat Rev Genet. 2014; 15(5):293-306).

[0209] C) Polyadenylation

[0210] Polyadenylation of an mRNA is important for nuclear transport, translation efficiency and stability of the mRNA, and all of these, as well as the process of polyadenylation, depend on specific RBPs. Most eukaryotic mRNAs receive a 3′ poly(A) tail of about 200 nucleotides after transcription. Polyadenylation involves different RNA-binding protein complexes which stimulate the activity of a poly(A)polymerase (Minvielle-Sebastia L et al. Curr Opin Cell Biol. 1999; 11:352-7). It is envisaged that the RNA-targeting effector proteins provided herein can be used to interfere with or promote the interaction between the RNA-binding proteins and RNA.

[0211] Examples of diseases which have been linked to defective proteins involved in polyadenylation are oculopharyngeal muscular dystrophy (OPMD) (Brais B, et al. Nat Genet. 1998; 18:164-7).

[0212] D) RNA Export

[0213] After pre-mRNA processing, the mRNA is exported from the nucleus to the cytoplasm. This is ensured by a cellular mechanism which involves the generation of a carrier complex, which is then translocated through the nuclear pore and releases the mRNA in the cytoplasm, with subsequent recycling of the carrier.

[0214] Overexpression of proteins (such as TAP) which play a role in the export of RNA has been found to increase export of transcripts that are otherwise ineffeciently exported in Xenopus (Katahira J, et al. EMBO J. 1999; 18:2593-609).

[0215] E) mRNA Localization

[0216] mRNA localization ensures spatially regulated protein production. Localization of transcripts to a specific region of the cell can be ensured by localization elements. In particular embodiments, it is envisaged that the effector proteins described herein can be used to target localization elements to the RNA of interest. The effector proteins can be designed to bind the target transcript and shuttle them to a location in the cell determined by its peptide signal tag. More particularly for instance, a RNA targeting effector protein fused to one or more nuclear localization signal (NLS) and/or one or more nuclear export signal (NES) can be used to alter RNA localization.

[0217] Further examples of localization signals include the zipcode binding protein (ZBP1) which ensures localization of β-actin to the cytoplasm in several asymmetric cell types, KDEL retention sequence (localization to endoplasmic reticulum), nuclear export signal (localization to cytoplasm), mitochondrial targeting signal (localization to mitochondria), peroxisomal targeting signal (localization to peroxisome) and m6A marking/YTHDF2 (localization to p-bodies). Other approaches that are envisaged are fusion of the RNA targeting effector protein with proteins of known localization (for instance membrane, synapse).

[0218] Alternatively, the effector protein according to the invention may for instance be used in localization-dependent knockdown. By fusing the effector protein to a appropriate localization signal, the effector is targeted to a particular cellular compartment. Only target RNAs residing in this compartment will effectively be targeted, whereas otherwise identical targets, but residing in a different cellular compartment will not be targeted, such that a localization dependent knockdown can be established.

[0219] F) Translation

[0220] The RNA targeting effector proteins described herein can be used to enhance or repress translation. It is envisaged that upregulating translation is a very robust way to control cellular circuits. Further, for functional studies a protein translation screen can be favorable over transcriptional upregulation screens, which have the shortcoming that upregulation of transcript does not translate into increased protein production.

[0221] It is envisaged that the RNA targeting effector proteins described herein can be used to bring translation initiation factors, such as EIF4G in the vicinity of the 5′ untranslated repeat (5′UTR) of a messenger RNA of interest to drive translation (as described in De Gregorio et al. EMBO J. 1999; 18(17):4865-74 for a non-reprogrammable RNA binding protein). As another example GLD2, a cytoplasmic poly(A) polymerase, can be recruited to the target mRNA by an RNA targeting effector protein. This would allow for directed polyadenylation of the target mRNA thereby stimulating translation.

[0222] Similarly, the RNA targeting effector proteins envisaged herein can be used to block translational repressors of mRNA, such as ZBP1 (Huttelmaier S, et al. Nature. 2005; 438:512-5). By binding to translation initiation site of a target RNA, translation can be directly affected.

[0223] In addition, fusing the RNA targeting effector proteins to a protein that stabilizes mRNAs, e.g. by preventing degradation thereof such as RNase inhibitors, it is possible to increase protein production from the transcripts of interest.

[0224] It is envisaged that the RNA targeting effector proteins described herein can be used to repress translation by binding in the 5UTR regions of a RNA transcript and preventing the ribosome from forming and beginning translation.

[0225] Further, the RNA targeting effector protein can be used to recruit Caf1, a component of the CCR4-NOT deadenylase complex, to the target mRNA, resulting in deadenylation or the target transcript and inhibition of protein translation.

[0226] For instance, the RNA targeting effector protein of the invention can be used to increase or decrease translation of therapeutically relevant proteins. Examples of therapeutic applications wherein the RNA targeting effector protein can be used to downregulate or upregulate translation are in amyotrophic lateral sclerosis (ALS) and cardiovascular disorders. Reduced levels of the glial glutamate transporter EAAT2 have been reported in ALS motor cortex and spinal cord, as well as multiple abnormal EAAT2 mRNA transcripts in ALS brain tissue. Loss of the EAAT2 protein and function thought to be the main cause of excitotoxicity in ALS. Restoration of EAAT2 protein levels and function may provide therapeutic benefit. Hence, the RNA targeting effector protein can be beneficially used to upregulate the expression of EAAT2 protein, e.g. by blocking translational repressors or stabilizing mRNA as described above. Apolipoprotein A1 is the major protein component of high density lipoprotein (HDL) and ApoA1 and HDL are generally considered as atheroprotective. It is envisages that the RNA targeting effector protein can be beneficially used to upregulate the expression of ApoA1, e.g. by blocking translational repressors or stabilizing mRNA as described above.

[0227] G) mRNA Turnover

[0228] Translation is tightly coupled to mRNA turnover and regulated mRNA stability. Specific proteins have been described to be involved in the stability of transcripts (such as the ELAV/Hu proteins in neurons, Keene J D, 1999, Proc Natl Acad Sci USA. 96:5-7) and tristetraprolin (TTP). These proteins stabilize target mRNAs by protecting the messages from degradation in the cytoplasm (Peng S S et al., 1988, EMBO J. 17:3461-70).

[0229] It can be envisaged that the RNA-targeting effector proteins of the present invention can be used to interfere with or to promote the activity of proteins acting to stabilize mRNA transcripts, such that mRNA turnover is affected. For instance, recruitment of human TTP to the target RNA using the RNA targeting effector protein would allow for adenylate-uridylate-rich element (AU-rich element) mediated translational repression and target degradation. AU-rich elements are found in the 3′ UTR of many mRNAs that code for proto-oncogenes, nuclear transcription factors, and cytokines and promote RNA stability. As another example, the RNA targeting effector protein can be fused to HuR, another mRNA stabilization protein (Hinman M N and Lou H, Cell Mol Life Sci 2008; 65:3168-81), and recruit it to a target transcript to prolong its lifetime or stabilize short-lived mRNA.

[0230] It is further envisaged that the RNA-targeting effector proteins described herein can be used to promote degradation of target transcripts. For instance, m6A methyltransferase can be recruited to the target transcript to localize the transcript to P-bodies leading to degradation of the target.

[0231] As yet another example, an RNA targeting effector protein as described herein can be fused to the non-specific endonuclease domain PilT N-terminus (PIN), to recruit it to a target transcript and allow degradation thereof.

[0232] Patients with paraneoplastic neurological disorder (PND)-associated encephalomyelitis and neuropathy are patients who develop autoantibodies against Hu-proteins in tumors outside of the central nervous system (Szabo A et al. 1991, Cell; 67:325-33 which then cross the blood-brain barrier. It can be envisaged that the RNA-targeting effector proteins of the present invention can be used to interfere with the binding of auto-antibodies to mRNA transcripts.

[0233] Patients with dystrophy type 1 (DM1), caused by the expansion of (CUG)n in the 3′ UTR of dystrophia myotonica-protein kinase (DMPK) gene, are characterized by the accumulation of such transcripts in the nucleus. It is envisaged that the RNA targeting effector proteins of the invention fused with an endonuclease targeted to the (CUG)n repeats could inhibit such accumulation of aberrant transcripts.

[0234] H) Interaction with Multi-Functional Proteins

[0235] Some RNA-binding proteins bind to multiple sites on numerous RNAs to function in diverse processes. For instance, the hnRNP A1 protein has been found to bind exonic splicing silencer sequences, antagonizing the splicing factors, associate with telomere ends (thereby stimulating telomere activity) and bind miRNA to facilitate Drosha-mediated processing thereby affecting maturation. It is envisaged that the RNA-binding effector proteins of the present invention can interfere with the binding of RNA-binding proteins at one or more locations.

[0236] I) RNA Folding

[0237] RNA adopts a defined structure in order to perform its biological activities. Transitions in conformation among alternative tertiary structures are critical to most RNA-mediated processes. However, RNA folding can be associated with several problems. For instance, RNA may have a tendency to fold into, and be upheld in, improper alternative conformations and/or the correct tertiary structure may not be sufficiently thermodynamically favored over alternative structures. The RNA targeting effector protein, in particular a cleavage-deficient or dead RNA targeting protein, of the invention may be used to direct folding of (m)RNA and/or capture the correct tertiary structure thereof. Use of RNA-targeting effector protein in modulating cellular status

[0238] In certain embodiments Cas13b in a complex with crRNA is activated upon binding to target RNA and subsequently cleaves any nearby ssRNA targets (i.e. “collateral” or “bystander” effects). Cas13b, once primed by the cognate target, can cleave other (non-complementary) RNA molecules. Such promiscuous RNA cleavage could potentially cause cellular toxicity, or otherwise affect cellular physiology or cell status.

[0239] Accordingly, in certain embodiments, the non-naturally occurring or engineered composition, vector system, or delivery systems as described herein are used for or are for use in induction of cell dormancy. In certain embodiments, the non-naturally occurring or engineered composition, vector system, or delivery systems as described herein are used for or are for use in induction of cell cycle arrest. In certain embodiments, the non-naturally occurring or engineered composition, vector system, or delivery systems as derscribed herein are used for or are for use in reduction of cell growth and/or cell proliferation, In certain embodiments, the non-naturally occurring or engineered composition, vector system, or delivery systems as derscribed herein are used for or are for use in induction of cell anergy. In certain embodiments, the non-naturally occurring or engineered composition, vector system, or delivery systems as derscribed herein are used for or are for use in induction of cell apoptosis. In certain embodiments, the non-naturally occurring or engineered composition, vector system, or delivery systems as derscribed herein are used for or are for use in incuction of cell necrosis. In certain embodiments, the non-naturally occurring or engineered composition, vector system, or delivery systems as derscribed herein are used for or are for use in induction of cell death. In certain embodiments, the non-naturally occurring or engineered composition, vector system, or delivery systems as described herein are used for or are for use in induction of programmed cell death.

[0240] In certain embodiments, the invention relates to a method for induction of cell dormancy comprising introducing or inducing the non-naturally occurring or engineered composition, vector system, or delivery systems as described herein. In certain embodiments, the invention relates to a method for induction of cell cycle arrest comprising introducing or inducing the non-naturally occurring or engineered composition, vector system, or delivery systems as described herein. In certain embodiments, the invention relates to a method for reduction of cell growth and/or cell proliferation comprising introducing or inducing the non-naturally occurring or engineered composition, vector system, or delivery systems as derscribed herein. In certain embodiments, the invention relates to a method for induction of cell anergy comprising introducing or inducing the non-naturally occurring or engineered composition, vector system, or delivery systems as derscribed herein. In certain embodiments, the invention relates to a method for induction of cell apoptosis comprising introducing or inducing the non-naturally occurring or engineered composition, vector system, or delivery systems as derscribed herein. In certain embodiments, the invention relates to a method for induction of cell necrosis comprising introducing or inducing the non-naturally occurring or engineered composition, vector system, or delivery systems as derscribed herein. In certain embodiments, the invention relates to a method for induction of cell death comprising introducing or inducing the non-naturally occurring or engineered composition, vector system, or delivery systems as described herein. In certain embodiments, the invention relates to a method for induction of programmed cell death comprising introducing or inducing the non-naturally occurring or engineered composition, vector system, or delivery systems as described herein.

[0241] The methods and uses as described herein may be therapeutic or prophylactic and may target particular cells, cell (sub)populations, or cell/tissue types. In particular, the methods and uses as described herein may be therapeutic or prophylactic and may target particular cells, cell (sub)populations, or cell/tissue types expressing one or more target sequences, such as one or more particular target RNA (e.g. ss RNA). Without limitation, target cells may for instance be cancer cells expressing a particular transcript, e.g. neurons of a given class, (immune) cells causing e.g. autoimmunity, or cells infected by a specific (e.g. viral) pathogen, etc.

[0242] Accordingly, in certain embodiments, the invention relates to a method for treating a pathological condition characterized by the presence of undersirable cells (host cells), comprising introducing or inducing the non-naturally occurring or engineered composition, vector system, or delivery systems as derscribed herein. In certain embodiments, the invention relates the use of the non-naturally occurring or engineered composition, vector system, or delivery systems as derscribed herein for treating a pathological condition characterized by the presence of undersirable cells (host cells). In certain embodiments, the invention relates the non-naturally occurring or engineered composition, vector system, or delivery systems as derscribed herein for use in treating a pathological condition characterized by the presence of undesirable cells (host cells). It is to be understood that preferably the CRISPR-Cas system targets a target specific for the undesirable cells. In certain embodiments, the invention relates to the use of the non-naturally occurring or engineered composition, vector system, or delivery systems as described herein for treating, preventing, or alleviating cancer. In certain embodiments, the invention relates to the non-naturally occurring or engineered composition, vector system, or delivery systems as described herein for use in treating, preventing, or alleviating cancer. In certain embodiments, the invention relates to a method for treating, preventing, or alleviating cancer comprising introducing or inducing the non-naturally occurring or engineered composition, vector system, or delivery systems as derscribed herein. It is to be understood that preferably the CRISPR-Cas system targets a target specific for the cancer cells. In certain embodiments, the invention relates to the use of the non-naturally occurring or engineered composition, vector system, or delivery systems as derscribed herein for treating, preventing, or alleviating infection of cells by a pathogen. In certain embodiments, the invention relates to the non-naturally occurring or engineered composition, vector system, or delivery systems as derscribed herein for use in treating, preventing, or alleviating infection of cells by a pathogen. In certain embodiments, the invention relates to a method for treating, preventing, or alleviating infection of cells by a pathogen comprising introducing or inducing the non-naturally occurring or engineered composition, vector system, or delivery systems as derscribed herein. It is to be understood that preferably the CRISPR-Cas system targets a target specific for the cells infected by the pathogen (e.g. a pathogen derived target). In certain embodiments, the invention relates to the use of the non-naturally occurring or engineered composition, vector system, or delivery systems as described herein for treating, preventing, or alleviating an autoimmune disorder. In certain embodiments, the invention relates to the non-naturally occurring or engineered composition, vector system, or delivery systems as described herein for use in treating, preventing, or alleviating an autoimmune disorder. In certain embodiments, the invention relates to a method for treating, preventing, or alleviating an autoimmune disorder comprising introducing or inducing the non-naturally occurring or engineered composition, vector system, or delivery systems as described herein. It is to be understood that preferably the CRISPR-Cas system targets a target specific for the cells responsible for the autoimmune disorder (e.g. specific immune cells).

### Use of RNA-Targeting Effector Protein in RNA Detection or Protein Detection

[0243] It is further envisaged that the RNA targeting effector protein can be used for detection of nucleic acids or proteins in a biological sample. The samples can be can be cellular or cell-free.

[0244] It is further envisaged that the RNA targeting effector protein can be used in Northern blot assays. Northern blotting involves the use of electrophoresis to separate RNA samples by size. The RNA targeting effector protein can be used to specifically bind and detect the target RNA sequence.

[0245] A RNA targeting effector protein can also be fused to a fluorescent protein (such as GFP) and used to track RNA localization in living cells. More particularly, the RNA targeting effector protein can be inactivated in that it no longer cleaves RNA. In particular embodiments, it is envisaged that a split RNA targeting effector protein can be used, whereby the signal is dependent on the binding of both subproteins, in order to ensure a more precise visualization. Alternatively, a split fluorescent protein can be used that is reconstituted when multiple RNA targeting effector protein complexes bind to the target transcript. It is further envisaged that a transcript is targeted at multiple binding sites along the mRNA so the fluorescent signal can amplify the true signal and allow for focal identification. As yet another alternative, the fluorescent protein can be reconstituted form a split intein.

[0246] RNA targeting effector proteins are for instance suitably used to determine the localization of the RNA or specific splice variants, the level of mRNA transcript, up- or down regulation of transcripts and disease-specific diagnosis. The RNA targeting effector proteins can be used for visualization of RNA in (living) cells using e.g. fluorescent microscopy or flow cytometry, such as fluorescence-activated cell sorting (FACS) which allows for high-throughput screening of cells and recovery of living cells following cell sorting. Further, expression levels of different transcripts can be assessed simultaneously under stress, e.g. inhibition of cancer growth using molecular inhibitors or hypoxic conditions on cells. Another application would be to track localization of transcripts to synaptic connections during a neural stimulus using two photon microscopy.

[0247] In certain embodiments, the components or complexes according to the invention as described herein can be used in multiplexed error-robust fluorescence in situ hybridization (MERFISH; Chen et al. Science; 2015; 348(6233)), such as for instance with (fluorescently) labeled Cas13b effectors.

### In Vitro Apex Labeling

[0248] Cellular processes depend on a network of molecular interactions among protein, RNA, and DNA. Accurate detection of protein—DNA and protein—RNA interactions is key to understanding such processes. In vitro proximity labeling technology employs an affinity tag combined with e.g. a photoactivatable probe to label polypeptides and RNAs in the vicinity of a protein or RNA of interest in vitro. After UV irradiation the photoactivatable group reacts with proteins and other molecules that are in close proximity to the tagged molecule, thereby labelling them. Labelled interacting molecules can subsequently be recovered and identified. The RNA targeting effector protein of the invention can for instance be used to target a probe to a selected RNA sequence.

[0249] These applications could also be applied in animal models for in vivo imaging of disease relevant applications or difficult-to culture cell types.

[0250] The invention provides agents and methods for diagnosing and monitoring health states through non-invasive sampling of cell free RNA, including testing for risk and guiding RNA-targeted therapies, and is useful in setting where rapid administration of therapy is important to treatment outcomes. In one embodiment, the invention provides cancer detection methods and agents for circulating tumor RNA, including for monitoring recurrence and/or development of common drug resistance mutations. In another embodiment, the invention provides detection methods and agents for detection and/or identification of bacterial species directly from blood or serum to monitor, e.g., disease progression and sepsis. In an embodiment of the invention, the Cas13b proteins and derivatives are used to distinguish and diagnose common diseases such as rhinovirus or upper respiratory tract infections from more serious infections such as bronchitis.

[0251] The invention provides methods and agents for rapid genotyping for emergency pharmacogenomics, including guidance for administration of anticoagulants during myocardial infarction or stroke treatment based on, e.g., VKORC1, CYP2C9, and CYP2C19 genotyping.

[0252] The invention provides agents and methods for monitoring food contamination by bacteria at all points along a food production and delivery chain. In another embodiment, the invention provides for quality control and monitoring, e.g. by identification of food sources and determination of purity. In one non-limiting example, the invention may be used to identify or confirm a food sources, such as a species of animal meat and seafood.

[0253] In another embodiment, the invention is used in phorensic determinations. For example, crime scene samples containing blood or other bodily fluids. In an embodiment of the invention, the invention is used to identify nucleic acid samples from fingerprints.

### Use of RNA-Targeting Effector Protein in RNA Origami/In Vitro Assembly Lines—Combinatorics

[0254] RNA origami refers to nanoscale folded structures for creating two-dimensional or three-dimensional structures using RNA as integrated template. The folded structure is encoded in the RNA and the shape of the resulting RNA is thus determined by the synthesized RNA sequence (Geary, et al. 2014. Science, 345 (6198). pp. 799-804). The RNA origami may act as scaffold for arranging other components, such as proteins, into complexes. The RNA targeting effector protein of the invention can for instance be used to target proteins of interest to the RNA origami using a suitable guide RNA.

### Use of RNA-Targeting Effector Protein in RNA Isolation or Purification, Enrichment or Depletion

[0255] It is further envisages that the RNA targeting effector protein when complexed to RNA can be used to isolate and/or purify the RNA. The RNA targeting effector protein can for instance be fused to an affinity tag that can be used to isolate and/or purify the RNA-RNA targeting effector protein complex. Such applications are for instance useful in the analysis of gene expression profiles in cells. In particular embodiments, it can be envisaged that the RNA targeting effector proteins can be used to target a specific noncoding RNA (ncRNA) thereby blocking its activity, providing a useful functional probe. In certain embodiments, the effecetor protein as described herein may be used to specifically enrich for a particular RNA (including but not limited to increasing stability, etc.), or alternatively to specifically deplete a particular RNA (such as without limitation for instance particular splice variants, isoforms, etc.).

Interrogation of lincRNA Function and Other Nuclear RNAs

[0256] Current RNA knockdown strategies such as siRNA have the disadvantage that they are mostly limited to targeting cytosolic transcripts since the protein machinery is cytosolic. The advantage of a RNA targeting effector protein of the present invention, an exogenous system that is not essential to cell function, is that it can be used in any compartment in the cell. By fusing a NLS signal to the RNA targeting effector protein, it can be guided to the nucleus, allowing nuclear RNAs to be targeted. It is for instance envisaged to probe the function of lincRNAs. Long intergenic non-coding RNAs (lincRNAs) are a vastly underexplored area of research. Most lincRNAs have as of yet unknown functions which could be studies using the RNA targeting effector protein of the invention.

### Identification of RNA Binding Proteins

[0257] Identifying proteins bound to specific RNAs can be useful for understanding the roles of many RNAs. For instance, many lincRNAs associate with transcriptional and epigenetic regulators to control transcription. Understanding what proteins bind to a given lincRNA can help elucidate the components in a given regulatory pathway. A RNA targeting effector protein of the invention can be designed to recruit a biotin ligase to a specific transcript in order to label locally bound proteins with biotin. The proteins can then be pulled down and analyzed by mass spectrometry to identify them.

### Assembly of Complexes on RNA and Substrate Shuttling

[0258] RNA targeting effector proteins of the invention can further be used to assemble complexes on RNA. This can be achieved by functionalizing the RNA targeting effector protein with multiple related proteins (e.g. components of a particular synthesis pathway). Alternatively, multiple RNA targeting effector proteins can be functionalized with such different related proteins and targeted to the same or adjacent target RNA. Useful application of assembling complexes on RNA are for instance facilitating substrate shuttling between proteins.

### Synthetic Biology

[0259] The development of biological systems have a wide utility, including in clinical applications. It is envisaged that the programmable RNA targeting effector proteins of the invention can be used fused to split proteins of toxic domains for targeted cell death, for instance using cancer-linked RNA as target transcript. Further, pathways involving protein-protein interaction can be influenced in synthetic biological systems with e.g. fusion complexes with the appropriate effectors such as kinases or other enzymes.

### Protein Splicing: Inteins

[0260] Protein splicing is a post-translational process in which an intervening polypeptide, referred to as an intein, catalyzes its own excision from the polypeptides Hacking it, referred to as exteins, as well as subsequent ligation of the exteins. The assembly of two or more RNA targeting effector proteins as described herein on a target transcript could be used to direct the release of a split intein (Topilina and Mills Mob DNA. 2014 Feb. 4; 5(1):5), thereby allowing for direct computation of the existence of a mRNA transcript and subsequent release of a protein product, such as a metabolic enzyme or a transcription factor (for downstream actuation of transcription pathways). This application may have significant relevance in synthetic biology (see above) or large-scale bioproduction (only produce product under certain conditions).

### Inducible, Dosed and Self-Inactivating Systems

[0261] In one embodiment, fusion complexes comprising an RNA targeting effector protein of the invention and an effector component are designed to be inducible, for instance light inducible or chemically inducible. Such inducibility allows for activation of the effector component at a desired moment in time.

[0262] Light inducibility is for instance achieved by designing a fusion complex wherein CRY2 PHR/CIBN pairing is used for fusion. This system is particularly useful for light induction of protein interactions in living cells (Konermann S, et al. Nature. 2013; 500:472-476).

[0263] Chemical inducibility is for instance provided for by designing a fusion complex wherein FKBP/FRB (FK506 binding protein/FKBP rapamycin binding) pairing is used for fusion. Using this system rapamycin is required for binding of proteins (Zetsche et al. Nat Biotechnol. 2015; 33(2):139-42 describes the use of this system for Cas9).

[0264] Further, when introduced in the cell as DNA, the RNA targeting effector protein of the inventions can be modulated by inducible promoters, such as tetracycline or doxycycline controlled transcriptional activation (Tet-On and Tet-Off expression system), hormone inducible gene expression system such as for instance an ecdysone inducible gene expression system and an arabinose-inducible gene expression system. When delivered as RNA, expression of the RNA targeting effector protein can be modulated via a riboswitch, which can sense a small molecule like tetracycline (as described in Goldfless et al. Nucleic Acids Res. 2012; 40(9):e64).

[0265] In one embodiment, the delivery of the RNA targeting effector protein of the invention can be modulated to change the amount of protein or crRNA in the cell, thereby changing the magnitude of the desired effect or any undesired off-target effects.

[0266] In one embodiment, the RNA targeting effector proteins described herein can be designed to be self-inactivating. When delivered to a cell as RNA, either mRNA or as a replication RNA therapeutic (Wrobleska et al Nat Biotechnol. 2015 August; 33(8): 839-841), they can self-inactivate expression and subsequent effects by destroying the own RNA, thereby reducing residency and potential undesirable effects.

[0267] For further in vivo applications of RNA targeting effector proteins as described herein, reference is made to Mackay J P et al (Nat Struct Mol Biol. 2011 March; 18(3):256-61), Nelles et al (Bioessays. 2015 July; 37(7):732-9) and Abil Z and Zhao H (Mol Biosyst. 2015 October; 11(10):2658-65), which are incorporated herein by reference. In particular, the following applications are envisaged in certain embodiments of the invention, preferably in certain embodiments by using catalytically inactive Cas13b: enhancing translation (e.g. Cas13b—translation promotion factor fusions (e.g. eIF4 fusions)); repressing translation (e.g. gRNA targeting ribosome binding sites); exon skipping (e.g. gRNAs targeting splice donor and/or acceptor sites); exon inclusion (e.g. gRNA targeting a particular exon splice donor and/or acceptor site to be included or Cas13b fused to or recruiting spliceosome components (e.g. U1 snRNA)); accessing RNA localization (e.g. Cas13b—marker fusions (e.g. EGFP fusions)); altering RNA localization (e.g. Cas13b—localization signal fusions (e.g. NLS or NES fusions)); RNA degradation (in this case no catalytically inactive Cas13b is to be used if relied on the activity of Cas13b, alternatively and for increased specificity, a split Cas13b may be used); inhibition of non-coding RNA function (e.g. miRNA), such as by degradation or binding of gRNA to functional sites (possibly titrating out at specific sites by relocalization by Cas13b-signal sequence fusions).

[0268] Cas13b function is robust to 5′ or 3′ extensions of the crRNA and to extension of the crRNA loop. It is therefore envisages that MS2 loops and other recruitment domains can be added to the crRNA without affecting complex formation and binding to target transcripts. Such modifications to the crRNA for recruitment of various effector domains are applicable in the uses of a RNA targeted effector proteins described above.

[0269] Cas13b is capable of mediating resistance to RNA phages. It is therefore envisaged that Cas13b can be used to immunize, e.g. animals, humans and plants, against RNA-only pathogens, including but not limited to retroviruses (e.g lentiviruses, such as HIV), HCV, Ebola virus and Zika virus.

[0270] In certain embodiments, Cas13b can process (cleave) its own array. This applies to both the wildtype Cas13b protein and the mutated Cas13b protein containing one or more mutated amino acid residues as herein-discussed. It is therefore envisaged that multiple crRNAs designed for different target transcripts and/or applications can be delivered as a single pre-crRNA or as a single transcript driven by one promotor. Such method of delivery has the advantages that it is substantially more compact, easier to synthesize and easier to delivery in viral systems. It will be understood that exact amino acid positions may vary for orthologues of a herein Cas13b can be adequately determined by protein alignment, as is known in the art, and as described herein elsewhere. Aspects of the invention also encompass methods and uses of the compositions and systems described herein in genome engineering, e.g. for altering or manipulating the expression of one or more genes or the one or more gene products, in prokaryotic or eukaryotic cells, in vitro, in vivo or ex vivo.

[0271] Aspects of the invention also encompass methods and uses of the compositions and systems described herein in genome or transcriptome engineering, e.g. for altering or manipulating the (protein) expression of one or more genes or the one or more gene products, in prokaryotic or eukaryotic cells, in vitro, in vivo or ex vivo.

[0272] In an aspect, the invention provides methods and compositions for modulating, e.g., reducing, (protein) expression of a target RNA in cells. In the subject methods, a Cas13b system of the invention is provided that interferes with transcription, stability, and/or translation of an RNA.

[0273] In certain embodiments, an effective amount of Cas13b system is used to cleave RNA or otherwise inhibit RNA expression. In this regard, the system has uses similar to siRNA and shRNA, thus can also be substituted for such methods. The method includes, without limitation, use of a Cas13b system as a substitute for e.g., an interfering ribonucleic acid (such as an siRNA or shRNA) or a transcription template thereof, e.g., a DNA encoding an shRNA. The Cas13b system is introduced into a target cell, e.g., by being administered to a mammal that includes the target cell,

[0274] Advantageously, a Cas13b system of the invention is specific. For example, whereas interfering ribonucleic acid (such as an siRNA or shRNA) polynucleotide systems are plagued by design and stability issues and off-target binding, a Cas13b system of the invention can be designed with high specificity.

### Destabilized Cas13b

[0275] In certain embodiments, the effector protein (CRISPR enzyme; Cas13b) according to the invention as described herein is associated with or fused to a destabilization domain (DD). In some embodiments, the DD is ER50. A corresponding stabilizing ligand for this DD is, in some embodiments, 4HT. As such, in some embodiments, one of the at least one DDs is ER50 and a stabilizing ligand therefor is 4HT. or CMP8 In some embodiments, the DD is DHFR50. A corresponding stabilizing ligand for this DD is, in some embodiments, TMP. As such, in some embodiments, one of the at least one DDs is DHFR50 and a stabilizing ligand therefor is TMP. In some embodiments, the DD is ER50. A corresponding stabilizing ligand for this DD is, in some embodiments, CMP8. CMP8 may therefore be an alternative stabilizing ligand to 4HT in the ER50 system. While it may be possible that CMP8 and 4HT can/should be used in a competitive matter, some cell types may be more susceptible to one or the other of these two ligands, and from this disclosure and the knowledge in the art the skilled person can use CMP8 and/or 4HT.

[0276] In some embodiments, one or two DDs may be fused to the N-terminal end of the CRISPR enzyme with one or two DDs fused to the C-terminal of the CRISPR enzyme. In some embodiments, the at least two DDs are associated with the CRISPR enzyme and the DDs are the same DD, i.e. the DDs are homologous. Thus, both (or two or more) of the DDs could be ER50 DDs. This is preferred in some embodiments. Alternatively, both (or two or more) of the DDs could be DHFR50 DDs. This is also preferred in some embodiments. In some embodiments, the at least two DDs are associated with the CRISPR enzyme and the DDs are different DDs, i.e. the DDs are heterologous. Thus, one of the DDS could be ER50 while one or more of the DDs or any other DDs could be DHFR50. Having two or more DDs which are heterologous may be advantageous as it would provide a greater level of degradation control. A tandem fusion of more than one DD at the N or C-term may enhance degradation; and such a tandem fusion can be, for example ER50-ER50-Cas13b or DHFR-DHFR-Cas13b It is envisaged that high levels of degradation would occur in the absence of either stabilizing ligand, intermediate levels of degradation would occur in the absence of one stabilizing ligand and the presence of the other (or another) stabilizing ligand, while low levels of degradation would occur in the presence of both (or two of more) of the stabilizing ligands. Control may also be imparted by having an N-terminal ER50 DD and a C-terminal DHFR50 DD.

[0277] In some embodiments, the fusion of the CRISPR enzyme with the DD comprises a linker between the DD and the CRISPR enzyme. In some embodiments, the linker is a GlySer linker. In some embodiments, the DD-CRISPR enzyme further comprises at least one Nuclear Export Signal (NES). In some embodiments, the DD-CRISPR enzyme comprises two or more NESs. In some embodiments, the DD-CRISPR enzyme comprises at least one Nuclear Localization Signal (NLS). This may be in addition to an NES. In some embodiments, the CRISPR enzyme comprises or consists essentially of or consists of a localization (nuclear import or export) signal as, or as part of, the linker between the CRISPR enzyme and the DD. HA or Flag tags are also within the ambit of the invention as linkers. Applicants use NLS and/or NES as linker and also use Glycine Serine linkers as short as GS up to (GGGGS)₃.

[0278] Destabilizing domains have general utility to confer instability to a wide range of proteins; see, e.g., Miyazaki, J Am Chem Soc. Mar. 7, 2012; 134(9): 3942-3945, incorporated herein by reference. CMP8 or 4-hydroxytamoxifen can be destabilizing domains. More generally, A temperature-sensitive mutant of mammalian DHFR (DHFRts), a destabilizing residue by the N-end rule, was found to be stable at a permissive temperature but unstable at 37° C. The addition of methotrexate, a high-affinity ligand for mammalian DHFR, to cells expressing DHFRts inhibited degradation of the protein partially. This was an important demonstration that a small molecule ligand can stabilize a protein otherwise targeted for degradation in cells. A rapamycin derivative was used to stabilize an unstable mutant of the FRB domain of mTOR (FRB*) and restore the function of the fused kinase, GSK-3β.6,7 This system demonstrated that ligand-dependent stability represented an attractive strategy to regulate the function of a specific protein in a complex biological environment. A system to control protein activity can involve the DD becoming functional when the ubiquitin complementation occurs by rapamycin induced dimerization of FK506-binding protein and FKBP12. Mutants of human FKBP12 or ecDHFR protein can be engineered to be metabolically unstable in the absence of their high-affinity ligands, Shield-1 or trimethoprim (TMP), respectively. These mutants are some of the possible destabilizing domains (DDs) useful in the practice of the invention and instability of a DD as a fusion with a CRISPR enzyme confers to the CRISPR protein degradation of the entire fusion protein by the proteasome. Shield-1 and TMP bind to and stabilize the DD in a dose-dependent manner. The estrogen receptor ligand binding domain (ERLBD, residues 305-549 of ERS1) can also be engineered as a destabilizing domain. Since the estrogen receptor signaling pathway is involved in a variety of diseases such as breast cancer, the pathway has been widely studied and numerous agonist and antagonists of estrogen receptor have been developed. Thus, compatible pairs of ERLBD and drugs are known. There are ligands that bind to mutant but not wild-type forms of the ERLBD. By using one of these mutant domains encoding three mutations (L384M, M421G, G521R), it is possible to regulate the stability of an ERLBD-derived DD using a ligand that does not perturb endogenous estrogen-sensitive networks. An additional mutation (Y537S) can be introduced to further destabilize the ERLBD and to configure it as a potential DD candidate. This tetra-mutant is an advantageous DD development. The mutant ERLBD can be fused to a CRISPR enzyme and its stability can be regulated or perturbed using a ligand, whereby the CRISPR enzyme has a DD. Another DD can be a 12-kDa (107-amino-acid) tag based on a mutated FKBP protein, stabilized by Shield1 ligand; see, e.g., Nature Methods 5, (2008). For instance a DD can be a modified FK506 binding protein 12 (FKBP12) that binds to and is reversibly stabilized by a synthetic, biologically inert small molecule, Shield-1; see, e.g., Banaszynski L A, Chen L C, Maynard-Smith L A, Ooi A G, Wandless T J. A rapid, reversible, and tunable method to regulate protein function in living cells using synthetic small molecules. Cell. 2006; 126:995-1004; Banaszynski L A, Sellmyer M A, Contag C H, Wandless T J, Thorne S H. Chemical control of protein stability and function in living mice. Nat Med. 2008; 14:1123-1127; Maynard-Smith L A, Chen L C, Banaszynski L A, Ooi A G, Wandless T J. A directed approach for engineering conditional protein stability using biologically silent small molecules. The Journal of biological chemistry. 2007; 282:24866-24872; and Rodriguez, Chem Biol. Mar. 23, 2012; 19(3): 391-398—all of which are incorporated herein by reference and may be employed in the practice of the invention in selected a DD to associate with a CRISPR enzyme in the practice of this invention. As can be seen, the knowledge in the art includes a number of DDs, and the DD can be associated with, e.g., fused to, advantageously with a linker, to a CRISPR enzyme, whereby the DD can be stabilized in the presence of a ligand and when there is the absence thereof the DD can become destabilized, whereby the CRISPR enzyme is entirely destabilized, or the DD can be stabilized in the absence of a ligand and when the ligand is present the DD can become destabilized; the DD allows the CRISPR enzyme and hence the CRISPR-Cas complex or system to be regulated or controlled—turned on or off so to speak, to thereby provide means for regulation or control of the system, e.g., in an in vivo or in vitro environment. For instance, when a protein of interest is expressed as a fusion with the DD tag, it is destabilized and rapidly degraded in the cell, e.g., by proteasomes. Thus, absence of stabilizing ligand leads to a D associated Cas being degraded. When a new DD is fused to a protein of interest, its instability is conferred to the protein of interest, resulting in the rapid degradation of the entire fusion protein. Peak activity for Cas is sometimes beneficial to reduce off-target effects. Thus, short bursts of high activity are preferred. The present invention is able to provide such peaks. In some senses the system is inducible. In some other senses, the system repressed in the absence of stabilizing ligand and de-repressed in the presence of stabilizing ligand.

Application of RNA targeting—CRISPR system to plants and yeast

### Definitions

[0279] In general, the term “plant” relates to any various photosynthetic, eukaryotic, unicellular or multicellular organism of the kingdom Plantae characteristically growing by cell division, containing chloroplasts, and having cell walls comprised of cellulose. The term plant encompasses monocotyledonous and dicotyledonous plants. Specifically, the plants are intended to comprise without limitation angiosperm and gymnosperm plants such as acacia, alfalfa, amaranth, apple, apricot, artichoke, ash tree, asparagus, avocado, banana, barley, beans, beet, birch, beech, blackberry, blueberry, broccoli, Brussel's sprouts, cabbage, canola, cantaloupe, carrot, cassava, cauliflower, cedar, a cereal, celery, chestnut, cherry, Chinese cabbage, citrus, clementine, clover, coffee, corn, cotton, cowpea, cucumber, cypress, eggplant, elm, endive, eucalyptus, fennel, figs, fir, geranium, grape, grapefruit, groundnuts, ground cherry, gum hemlock, hickory, kale, kiwifruit, kohlrabi, larch, lettuce, leek, lemon, lime, locust, pine, maidenhair, maize, mango, maple, melon, millet, mushroom, mustard, nuts, oak, oats, oil palm, okra, onion, orange, an ornamental plant or flower or tree, papaya, palm, parsley, parsnip, pea, peach, peanut, pear, peat, pepper, persimmon, pigeon pea, pine, pineapple, plantain, plum, pomegranate, potato, pumpkin, radicchio, radish, rapeseed, raspberry, rice, rye, sorghum, safflower, sallow, soybean, spinach, spruce, squash, strawberry, sugar beet, sugarcane, sunflower, sweet potato, sweet corn, tangerine, tea, tobacco, tomato, trees, triticale, turf grasses, turnips, vine, walnut, watercress, watermelon, wheat, yams, yew, and zucchini. The term plant also encompasses Algae, which are mainly photoautotrophs unified primarily by their lack of roots, leaves and other organs that characterize higher plants.

[0280] The methods for modulating gene expression using the RNA targeting system as described herein can be used to confer desired traits on essentially any plant. A wide variety of plants and plant cell systems may be engineered for the desired physiological and agronomic characteristics described herein using the nucleic acid constructs of the present disclosure and the various transformation methods mentioned above. In preferred embodiments, target plants and plant cells for engineering include, but are not limited to, those monocotyledonous and dicotyledonous plants, such as crops including grain crops (e.g., wheat, maize, rice, millet, barley), fruit crops (e.g., tomato, apple, pear, strawberry, orange); forage crops (e.g., alfalfa), root vegetable crops (e.g., carrot, potato, sugar beets, yam), leafy vegetable crops (e.g., lettuce, spinach); flowering plants (e.g., petunia, rose, chrysanthemum), conifers and pine trees (e.g., pine fir, spruce); plants used in phytoremediation (e.g., heavy metal accumulating plants); oil crops (e.g., sunflower, rape seed) and plants used for experimental purposes (e.g., Arabidopsis). Thus, the methods and CRISPR-Cas systems can be used over a broad range of plants, such as for example with dicotyledonous plants belonging to the orders Magniolales, Illiciales, Laurales, Piperales, Aristochiales, Nymphaeales, Ranunculales, Papeverales, Sarraceniaceae, Trochodendrales, Hamamelidales, Eucomiales, Leitneriales, Myri cales, agales, Casuarinales, Caryophyllales, Batales, Polygonales, Plumbaginales, Dilleniales, Theales, Malvales, IJrticales, Lecythidales, Violales, Salicales, Capparales, Ericales, Diapensales, Ebenales, Primulales, Rosales, Fabales, Podostemales; Haloragales; Myrtales, Cornales, Proteales, San tales, Rafflesiales, Celastrales, Euphorbiales, Rhamnales, Sapindales, Juglandales, Geraniales, Polygalales, Umbellales, Gentianales; Polemoniales, Lamiales, Plantaginales, Scrophulariales, Campanulales, Rubiales, Dipsacales, and Asterales; the methods and CRISPR-Cas systems can be used with monocotyledonous plants such as those belonging to the orders Alismatales, Hydrocharitales, Najadales, Triuridales, Commelinales, Eriocaulales, Restionales, Poales, Juncales, Cyperales, Typhales, Bromeliales, Zingiberales, Arecales, Cyclanthales, Pandanales; Arales, Lilliales; and Orchid ales, or with plants belonging to Gymnospermae, e.g those belonging to the orders Pinales, Ginkgoales, Cycadales, Araucariales, Cupressales and Gnetales.

[0281] The RNA targeting CRISPR systems and methods of use described herein can be used over a broad range of plant species, included in the non-limitative list of dicot, monocot or gymnosperm genera hereunder: Atropa, Alseodaphne, Anacardium, Arachis, Beilschmiedia, Brassica, Carthamus, Cocculus, Croton, Cucumis, Citrus, Citrullus, Capsicum, Catharanthus, Cocos, Coffea, Cucurbita, Amens, Duguetia, Eschscholzia, Ficus, Fragaria, Glaucium, Glycine, Gossypium, Helianthus, Hevea, Hyoscyamus, Lactuca, Landolphia, Linum, Litsea, lycopersicon, Lupinus, Manihot, Majorana, latus, Medicago, Nicotiana, Olea, Parthenium, Papaver, Persea, Phaseolus, Pistacia, Pisum, Pyrus, Prunus, Raphanus, Ricinus, Senecio, Sillomenilrm, Stephania, Sinapis, Solanum, Theobroma, Trifotium, Trigonella, Vida, Vinca, Vilis, and Vigna; and the genera Allium, Andropogort, Aragrostis, Asparagus, Avena, cynodon, Elaeis, Festuca, Festulolium, Heterocallis, Hordeum, Lonna, Lotium, Musa, Oryza, Panicum, Pannesetum, Phleum, Poa, Secale, Sorghum, Triticum, Zea, Abies, Cunninghamia, Ephedra, Picea, Pima, and Pseudotsuga.

[0282] The RNA targeting CRISPR systems and methods of use can also be used over a broad range of “algae” or “algae cells”; including for example algae selected from several eukaryotic phyla, including the Rhodophyta (red algae); Chlorophyta (green algae), Phaeophyta (brown algae), Bacillariophyta (diatoms), Eustigmatophyta and dinoflagellates as well as the prokaryotic phylum Cyanobacteria (blue-green algae). The term “algae” includes for example algae selected from: Amphora, Anabaena, Anikstrodesmis, Botryococcus, Chaetoceros, Chlamydomonas, Chlorella, Chlorococcum, Cyclotella, Cylindrotheca, Dunaliella; Emiliana, Euglena, Hematococcus; Isochrysis, Monochrysis, Monoraphidium, Nannochloris, Nannnochloropsis, Navicula, Nephrochloris, Nephroselmis, Nitzschia, Nodularia, Nostoc, Oochromonas, Oocystis; Oscillartoria, Pavlova, Phaeodactylum, Playtmonas, Pleurochrysis, Porhyra, Pseudoanabaena, Pyramimonas, Stichococcus, Synechococcus, Synechocystis, Tetraselmis, Thalassiosira, and Trichodesmium.

[0283] A part of a plant, i.e., a “plant tissue” may be treated according to the methods of the present invention to produce an improved plant. Plant tissue also encompasses plant cells. The term “plant cell” as used herein refers to individual units of a living plant, either in an intact whole plant or in an isolated form grown in in vitro tissue cultures, on media or agar, in suspension in a growth media or buffer or as a part of higher organized unites, such as, for example, plant tissue, a plant organ, or a whole plant.

[0284] A “protoplast” refers to a plant cell that has had its protective cell wall completely or partially removed using, for example, mechanical or enzymatic means resulting in an intact biochemical competent unit of living plant that can reform their cell wall, proliferate and regenerate grow into a whole plant under proper growing conditions.

[0285] The term “transformation” broadly refers to the process by which a plant host is genetically modified by the introduction of DNA by means of Agrobacteria or one of a variety of chemical or physical methods. As used herein, the term “plant host” refers to plants, including any cells, tissues, organs, or progeny of the plants. Many suitable plant tissues or plant cells can be transformed and include, but are not limited to, protoplasts, somatic embryos, pollen, leaves, seedlings, stems, calli, stolons, microtubers, and shoots. A plant tissue also refers to any clone of such a plant, seed, progeny, propagule whether generated sexually or asexually, and descendents of any of these, such as cuttings or seed.

[0286] The term “transformed” as used herein, refers to a cell, tissue, organ, or organism into which a foreign DNA molecule, such as a construct, has been introduced. The introduced DNA molecule may be integrated into the genomic DNA of the recipient cell, tissue, organ, or organism such that the introduced DNA molecule is transmitted to the subsequent progeny. In these embodiments, the “transformed” or “transgenic” cell or plant may also include progeny of the cell or plant and progeny produced from a breeding program employing such a transformed plant as a parent in a cross and exhibiting an altered phenotype resulting from the presence of the introduced DNA molecule. Preferably, the transgenic plant is fertile and capable of transmitting the introduced DNA to progeny through sexual reproduction.

[0287] The term “progeny”, such as the progeny of a transgenic plant, is one that is born of, begotten by, or derived from a plant or the transgenic plant. The introduced DNA molecule may also be transiently introduced into the recipient cell such that the introduced DNA molecule is not inherited by subsequent progeny and thus not considered “transgenic”. Accordingly, as used herein, a “non-transgenic” plant or plant cell is a plant which does not contain a foreign DNA stably integrated into its genome.

[0288] The term “plant promoter” as used herein is a promoter capable of initiating transcription in plant cells, whether or not its origin is a plant cell. Exemplary suitable plant promoters include, but are not limited to, those that are obtained from plants, plant viruses, and bacteria such as Agrobacterium or Rhizobium which comprise genes expressed in plant cells.

[0289] As used herein, a “fungal cell” refers to any type of eukaryotic cell within the kingdom of fungi. Phyla within the kingdom of fungi include Ascomycota, Basidiomycota, Blastocladiomycota, Chytridiomycota, Glomeromycota, Microsporidia, and Neocallimastigomycota. Fungal cells may include yeasts, molds, and filamentous fungi. In some embodiments, the fungal cell is a yeast cell.

[0290] As used herein, the term “yeast cell” refers to any fungal cell within the phyla Ascomycota and Basidiomycota. Yeast cells may include budding yeast cells, fission yeast cells, and mold cells. Without being limited to these organisms, many types of yeast used in laboratory and industrial settings are part of the phylum Ascomycota. In some embodiments, the yeast cell is an S. cerervisiae, Kluyveromyces marxianus, or Issatchenkia orientalis cell. Other yeast cells may include without limitation Candida spp. (e.g., Candida albicans), Yarrowia spp. (e.g., Yarrowia lipolytica), Pichia spp. (e.g., Pichia pastoris), Kluyveromyces spp. (e.g., Kluyveromyces lactis and Kluyveromyces marxianus), Neurospora spp. (e.g., Neurospora crassa), Fusarium spp. (e.g., Fusarium oxysporum), and Issatchenkia spp. (e.g., Issatchenkia orientalis, a.k.a. Pichia kudriavzevii and Candida acidothermophilum). In some embodiments, the fungal cell is a filamentous fungal cell. As used herein, the term “filamentous fungal cell” refers to any type of fungal cell that grows in filaments, i.e., hyphae or mycelia. Examples of filamentous fungal cells may include without limitation Aspergillus spp. (e.g., Aspergillus niger), Trichoderma spp. (e.g., Trichoderma reesei), Rhizopus spp. (e.g., Rhizopus oryzae), and Mortierella spp. (e.g., Mortierella isabellina).

[0291] In some embodiments, the fungal cell is an industrial strain. As used herein, “industrial strain” refers to any strain of fungal cell used in or isolated from an industrial process, e.g., production of a product on a commercial or industrial scale. Industrial strain may refer to a fungal species that is typically used in an industrial process, or it may refer to an isolate of a fungal species that may be also used for non-industrial purposes (e.g., laboratory research). Examples of industrial processes may include fermentation (e.g., in production of food or beverage products), distillation, biofuel production, production of a compound, and production of a polypeptide. Examples of industrial strains may include, without limitation, JAY270 and ATCC4124.

[0292] In some embodiments, the fungal cell is a polyploid cell. As used herein, a “polyploid” cell may refer to any cell whose genome is present in more than one copy. A polyploid cell may refer to a type of cell that is naturally found in a polyploid state, or it may refer to a cell that has been induced to exist in a polyploid state (e.g., through specific regulation, alteration, inactivation, activation, or modification of meiosis, cytokinesis, or DNA replication). A polyploid cell may refer to a cell whose entire genome is polyploid, or it may refer to a cell that is polyploid in a particular genomic locus of interest. Without wishing to be bound to theory, it is thought that the abundance of guide RNA may more often be a rate-limiting component in genome engineering of polyploid cells than in haploid cells, and thus the methods using the Cas13b CRISPR system described herein may take advantage of using a certain fungal cell type.

[0293] In some embodiments, the fungal cell is a diploid cell. As used herein, a “diploid” cell may refer to any cell whose genome is present in two copies. A diploid cell may refer to a type of cell that is naturally found in a diploid state, or it may refer to a cell that has been induced to exist in a diploid state (e.g., through specific regulation, alteration, inactivation, activation, or modification of meiosis, cytokinesis, or DNA replication). For example, the S. cerevisiae strain S228C may be maintained in a haploid or diploid state. A diploid cell may refer to a cell whose entire genome is diploid, or it may refer to a cell that is diploid in a particular genomic locus of interest. In some embodiments, the fungal cell is a haploid cell. As used herein, a “haploid” cell may refer to any cell whose genome is present in one copy. A haploid cell may refer to a type of cell that is naturally found in a haploid state, or it may refer to a cell that has been induced to exist in a haploid state (e.g., through specific regulation, alteration, inactivation, activation, or modification of meiosis, cytokinesis, or DNA replication). For example, the S. cerevisiae strain S228C may be maintained in a haploid or diploid state. A haploid cell may refer to a cell whose entire genome is haploid, or it may refer to a cell that is haploid in a particular genomic locus of interest.

[0294] As used herein, a “yeast expression vector” refers to a nucleic acid that contains one or more sequences encoding an RNA and/or polypeptide and may further contain any desired elements that control the expression of the nucleic acid(s), as well as any elements that enable the replication and maintenance of the expression vector inside the yeast cell. Many suitable yeast expression vectors and features thereof are known in the art; for example, various vectors and techniques are illustrated in in Yeast Protocols, 2nd edition, Xiao, W., ed. (Humana Press, New York, 2007) and Buckholz, R. G. and Gleeson, M. A. (1991) Biotechnology (NY) 9(11): 1067-72. Yeast vectors may contain, without limitation, a centromeric (CEN) sequence, an autonomous replication sequence (ARS), a promoter, such as an RNA Polymerase III promoter, operably linked to a sequence or gene of interest, a terminator such as an RNA polymerase III terminator, an origin of replication, and a marker gene (e.g., auxotrophic, antibiotic, or other selectable markers). Examples of expression vectors for use in yeast may include plasmids, yeast artificial chromosomes, 2μ plasmids, yeast integrative plasmids, yeast replicative plasmids, shuttle vectors, and episomal plasmids.

### Stable Integration of RNA Targeting CRISPR System Components in the Genome of Plants and Plant Cells

[0295] In particular embodiments, it is envisaged that the polynucleotides encoding the components of the RNA targeting CRISPR system are introduced for stable integration into the genome of a plant cell. In these embodiments, the design of the transformation vector or the expression system can be adjusted depending on when, where and under what conditions the guide RNA and/or the RNA targeting gene(s) are expressed.

[0296] In particular embodiments, it is envisaged to introduce the components of the RNA targeting CRISPR system stably into the genomic DNA of a plant cell. Additionally or alternatively, it is envisaged to introduce the components of the RNA targeting CRISPR system for stable integration into the DNA of a plant organelle such as, but not limited to a plastid, e mitochondrion or a chloroplast.

[0297] The expression system for stable integration into the genome of a plant cell may contain one or more of the following elements: a promoter element that can be used to express the guide RNA and/or RNA targeting enzyme in a plant cell; a 5′ untranslated region to enhance expression; an intron element to further enhance expression in certain cells, such as monocot cells; a multiple-cloning site to provide convenient restriction sites for inserting the one or more guide RNAs and/or the RNA targeting gene sequences and other desired elements; and a 3′ untranslated region to provide for efficient termination of the expressed transcript.

[0298] The elements of the expression system may be on one or more expression constructs which are either circular such as a plasmid or transformation vector, or non-circular such as linear double stranded DNA.

[0299] In a particular embodiment, a RNA targeting CRISPR expression system comprises at least:
[0300] (a) a nucleotide sequence encoding a guide RNA (gRNA) that hybridizes with a target sequence in a plant, and wherein the guide RNA comprises a guide sequence and a direct repeat sequence, and
[0301] (b) a nucleotide sequence encoding a RNA targeting protein,
   wherein components (a) or (b) are located on the same or on different constructs, and whereby the different nucleotide sequences can be under control of the same or a different regulatory element operable in a plant cell.

[0302] DNA construct(s) containing the components of the RNA targeting CRISPR system, and, where applicable, template sequence may be introduced into the genome of a plant, plant part, or plant cell by a variety of conventional techniques. The process generally comprises the steps of selecting a suitable host cell or host tissue, introducing the construct(s) into the host cell or host tissue, and regenerating plant cells or plants therefrom. In particular embodiments, the DNA construct may be introduced into the plant cell using techniques such as but not limited to electroporation, microinjection, aerosol beam injection of plant cell protoplasts, or the DNA constructs can be introduced directly to plant tissue using biolistic methods, such as DNA particle bombardment (see also Fu et al., Transgenic Res. 2000 February; 9(1):11-9). The basis of particle bombardment is the acceleration of particles coated with gene/s of interest toward cells, resulting in the penetration of the protoplasm by the particles and typically stable integration into the genome. (see e.g. Klein et al, Nature (1987). Klein et al, Bio/Technology (1992), Casas et al, Proc. Natl. Acad. Sci. USA (1993).).

[0303] In particular embodiments, the DNA constructs containing components of the RNA targeting CRISPR system may be introduced into the plant by Agrobacterium-mediated transformation. The DNA constructs may be combined with suitable T-DNA flanking regions and introduced into a conventional Agrobacterium tumeaciens host vector. The foreign DNA can be incorporated into the genome of plants by infecting the plants or by incubating plant protoplasts with Agrobacterium bacteria, containing one or more Ti (tumor-inducing) plasmids. (see e.g. Fraley et al., (1985), Rogers et al., (1987) and U.S. Pat. No. 5,563,055).

### Plant Promoters

[0304] In order to ensure appropriate expression in a plant cell, the components of the Cas13b CRISPR system described herein are typically placed under control of a plant promoter, i.e. a promoter operable in plant cells. The use of different types of promoters is envisaged.

[0305] A constitutive plant promoter is a promoter that is able to express the open reading frame (ORF) that it controls in all or nearly all of the plant tissues during all or nearly all developmental stages of the plant (referred to as “constitutive expression”). One non-limiting example of a constitutive promoter is the cauliflower mosaic virus 35S promoter. The present invention envisages methods for modifying RNA sequences and as such also envisages regulating expression of plant biomolecules. In particular embodiments of the present invention it is thus advantageous to place one or more elements of the RNA targeting CRISPR system under the control of a promoter that can be regulated. “Regulated promoter” refers to promoters that direct gene expression not constitutively, but in a temporally- and/or spatially-regulated manner, and includes tissue-specific, tissue-preferred and inducible promoters. Different promoters may direct the expression of a gene in different tissues or cell types, or at different stages of development, or in response to different environmental conditions. In particular embodiments, one or more of the RNA targeting CRISPR components are expressed under the control of a constitutive promoter, such as the cauliflower mosaic virus 35S promoter issue-preferred promoters can be utilized to target enhanced expression in certain cell types within a particular plant tissue, for instance vascular cells in leaves or roots or in specific cells of the seed. Examples of particular promoters for use in the RNA targeting CRISPR system are found in Kawamata et al., (1997) Plant Cell Physiol 38:792-803; Yamamoto et al., (1997) Plant J 12:255-65; Hire et al, (1992) Plant Mol Biol 20:207-18, Kuster et al, (1995) Plant Mol Biol 29:759-72, and Capana et al., (1994) Plant Mol Biol 25:681-91.

Examples of promoters that are inducible and that allow for spatiotemporal control of gene editing or gene expression may use a form of energy. The form of energy may include but is not limited to sound energy, electromagnetic radiation, chemical energy and/or thermal energy. Examples of inducible systems include tetracycline inducible promoters (Tet-On or Tet-Off), small molecule two-hybrid transcription activations systems (FKBP, ABA, etc), or light inducible systems (Phytochrome, LOV domains, or cryptochrome), such as a Light Inducible Transcriptional Effector (LITE) that direct changes in transcriptional activity in a sequence-specific manner. The components of a light inducible system may include a RNA targeting CRISPR enzyme, a light-responsive cytochrome heterodimer (e.g. from Arabidopsis thaliana), and a transcriptional activation/repression domain. Further examples of inducible DNA binding proteins and methods for their use are provided in U.S. 61/736,465 and U.S. 61/721,283, which is hereby incorporated by reference in its entirety.

[0306] In particular embodiments, transient or inducible expression can be achieved by using, for example, chemical-regulated promotors, i.e. whereby the application of an exogenous chemical induces gene expression. Modulating of gene expression can also be obtained by a chemical-repressible promoter, where application of the chemical represses gene expression. Chemical-inducible promoters include, but are not limited to, the maize 1n2-2 promoter, activated by benzene sulfonamide herbicide safeners (De VeyIcier et al., (1997) Plant Cell Physiol 38:568-77), the maize GST promoter (GST-11-27, WO93/01294), activated by hydrophobic electrophilic compounds used as pre-emergent herbicides, and the tobacco PR-1 a promoter (Ono et al., (2004) Biosci Biotechnol Biochem 68:803-7) activated by salicylic acid. Promoters which are regulated by antibiotics, such as tetracycline-inducible and tetracycline-repressible promoters (Gatz et al., (1991) Mol Gen Genet 227:229-37; U.S. Pat. Nos. 5,814,618 and 5,789,156) can also be used herein.

Translocation to and/or Expression in Specific Plant Organelles

[0307] The expression system may comprise elements for translocation to and/or expression in a specific plant organelle.

### Chloroplast Targeting

[0308] In particular embodiments, it is envisaged that the RNA targeting CRISPR system is used to specifically modify expression and/or translation of chloroplast genes or to ensure expression in the chloroplast. For this purpose use is made of chloroplast transformation methods or compartmentalization of the RNA targeting CRISPR components to the chloroplast. For instance, the introduction of genetic modifications in the plastid genome can reduce biosafety issues such as gene flow through pollen.

[0309] Methods of chloroplast transformation are known in the art and include Particle bombardment, PEG treatment, and microinjection. Additionally, methods involving the translocation of transformation cassettes from the nuclear genome to the plastid can be used as described in WO2010061186.

[0310] Alternatively, it is envisaged to target one or more of the RNA targeting CRISPR components to the plant chloroplast. This is achieved by incorporating in the expression construct a sequence encoding a chloroplast transit peptide (CTP) or plastid transit peptide, operably linked to the 5′ region of the sequence encoding the RNA targeting protein. The CTP is removed in a processing step during translocation into the chloroplast. Chloroplast targeting of expressed proteins is well known to the skilled artisan (see for instance Protein Transport into Chloroplasts, 2010, Annual Review of Plant Biology, Vol. 61: 157-180). In such embodiments it is also desired to target the one or more guide RNAs to the plant chloroplast. Methods and constructs which can be used for translocating guide RNA into the chloroplast by means of a chloroplast localization sequence are described, for instance, in US 20040142476, incorporated herein by reference. Such variations of constructs can be incorporated into the expression systems of the invention to efficiently translocate the RNA targeting-guide RNA(s).

### Introduction of Polynucleotides Encoding the CRISPR-RNA Targeting System in Algal Cells.

[0311] Transgenic algae (or other plants such as rape) may be particularly useful in the production of vegetable oils or biofuels such as alcohols (especially methanol and ethanol) or other products. These may be engineered to express or overexpress high levels of oil or alcohols for use in the oil or biofuel industries.

[0312] U.S. Pat. No. 8,945,839 describes a method for engineering Micro-Algae (Chlamydomonas reinhardtii cells) species) using Cas9. Using similar tools, the methods of the RNA targeting CRISPR system described herein can be applied on Chlamydomonas species and other algae. In particular embodiments, RNA targeting protein and guide RNA(s) are introduced in algae expressed using a vector that expresses RNA targeting protein under the control of a constitutive promoter such as Hsp70A-Rbc S2 or Beta2-tubulin. Guide RNA is optionally delivered using a vector containing T7 promoter. Alternatively, RNA targeting mRNA and in vitro transcribed guide RNA can be delivered to algal cells. Electroporation protocols are available to the skilled person such as the standard recommended protocol from the GeneArt Chlamydomonas Engineering kit.

### Introduction of Polynucleotides Encoding RNA Targeting Components in Yeast Cells

[0313] In particular embodiments, the invention relates to the use of the RNA targeting CRISPR system for RNA editing in yeast cells. Methods for transforming yeast cells which can be used to introduce polynucleotides encoding the RNA targeting CRISPR system components are well known to the artisan and are reviewed by Kawai et al., 2010, Bioeng Bugs. 2010 November-December; 1(6): 395-403). Non-limiting examples include transformation of yeast cells by lithium acetate treatment (which may further include carrier DNA and PEG treatment), bombardment or by electroporation.

Transient expression of RNA targeting CRISPR system components in plants and plant cell

[0314] In particular embodiments, it is envisaged that the guide RNA and/or RNA targeting gene are transiently expressed in the plant cell. In these embodiments, the RNA targeting CRISPR system can ensure modification of RNA target molecules only when both the guide RNA and the RNA targeting protein is present in a cell, such that gene expression can further be controlled. As the expression of the RNA targeting enzyme is transient, plants regenerated from such plant cells typically contain no foreign DNA. In particular embodiments the RNA targeting enzyme is stably expressed by the plant cell and the guide sequence is transiently expressed.

[0315] In particularly preferred embodiments, the RNA targeting CRISPR system components can be introduced in the plant cells using a plant viral vector (Scholthof et at 1996, Annu Rev Phytopathol. 1996; 34:299-323). In further particular embodiments, said viral vector is a vector from a DNA virus. For example, geminivirus (e.g., cabbage leaf curl virus, bean yellow dwarf virus, wheat dwarf virus, tomato leaf curl virus, maize streak virus, tobacco leaf curl virus, or tomato golden mosaic virus) or nanovirus (e.g., Faba bean necrotic yellow virus). In other particular embodiments, said viral vector is a vector from an RNA virus. For example, tobravirus (e.g., tobacco rattle virus, tobacco mosaic virus), potexvirus (e.g., potato virus X), or hordeivirus (e.g., barley stripe mosaic virus). The replicating genomes of plant viruses are non-integrative vectors, which is of interest in the context of avoiding the production of GMO plants.

[0316] In particular embodiments, the vector used for transient expression of RNA targeting CRISPR constructs is for instance a pEAQ vector, which is tailored for Agrobacterium-mediated transient expression (Sainsbury F. et al., Plant Biotechnol J. 2009 Sep., 7(7):682-93) in the protoplast. Precise targeting of genomic locations was demonstrated using a modified Cabbage Leaf Curl virus (CaLCuV) vector to express gRNAs in stable transgenic plants expressing a CRISPR enzyme (Scientific Reports 5, Article number: 14926 (2015), doi:10, 1038/srep14926).

[0317] In particular embodiments, double-stranded DNA fragments encoding the guide RNA and/or the RNA targeting gene can be transiently introduced into the plant cell. In such embodiments, the introduced double-stranded DNA fragments are provided in sufficient quantity to modify RNA molecule(s) in the cell but do not persist after a contemplated period of time has passed or after one or more cell divisions. Methods for direct DNA transfer in plants are known by the skilled artisan (see for instance Davey et al. Plant Mol Biol. 1989 September; 13(3):273-85.)

[0318] In other embodiments, an RNA polynucleotide encoding the RNA targeting protein is introduced into the plant cell, which is then translated and processed by the host cell generating the protein in sufficient quantity to modify the RNA molecule(s) cell (in the presence of at least one guide RNA) but which does not persist after a contemplated period of time has passed or after one or more cell divisions. Methods for introducing mRNA to plant protoplasts for transient expression are known by the skilled artisan (see for instance in Gallie, Plant Cell Reports (1993), 13; 119-122). Combinations of the different methods described above are also envisaged.

### Delivery of RNA Targeting CRISPR Components to the Plant Cell

[0319] In particular embodiments, it is of interest to deliver one or more components of the RNA targeting CRISPR system directly to the plant cell. This is of interest, inter alia, for the generation of non-transgenic plants (see below). In particular embodiments, one or more of the RNA targeting components is prepared outside the plant or plant cell and delivered to the cell. For instance in particular embodiments, the RNA targeting protein is prepared in vitro prior to introduction to the plant cell. RNA targeting protein can be prepared by various methods known by one of skill in the art and include recombinant production. After expression, the RNA targeting protein is isolated, refolded if needed, purified and optionally treated to remove any purification tags, such as a His-tag. Once crude, partially purified, or more completely purified RNA targeting protein is obtained, the protein may be introduced to the plant cell.

[0320] In particular embodiments, the RNA targeting protein is mixed with guide RNA targeting the RNA of interest to form a pre-assembled ribonucleoprotein.

[0321] The individual components or pre-assembled ribonucleoprotein can be introduced into the plant cell via electroporation, by bombardment with RNA targeting-associated gene product coated particles, by chemical transfection or by some other means of transport across a cell membrane. For instance, transfection of a plant protoplast with a pre-assembled CRISPR ribonucleoprotein has been demonstrated to ensure targeted modification of the plant genome (as described by Woo et al. Nature Biotechnology, 2015; DOI: 10.1038/nbt.3389). These methods can be modified to achieve targeted modification of RNA molecules in the plants.

[0322] In particular embodiments, the RNA targeting CRISPR system components are introduced into the plant cells using nanoparticles. The components, either as protein or nucleic acid or in a combination thereof, can be uploaded onto or packaged in nanoparticles and applied to the plants (such as for instance described in WO 2008042156 and US 20130185823). In particular, embodiments of the invention comprise nanoparticles uploaded with or packed with DNA molecule(s) encoding the RNA targeting protein, DNA molecules encoding the guide RNA and/or isolated guide RNA as described in WO2015089419.

[0323] Further means of introducing one or more components of the RNA targeting CRISPR system to the plant cell is by using cell penetrating peptides (CPP). Accordingly, in particular, embodiments the invention comprises compositions comprising a cell penetrating peptide linked to an RNA targeting protein. In particular embodiments of the present invention, an RNA targeting protein and/or guide RNA(s) is coupled to one or more CPPs to effectively transport them inside plant protoplasts (Ramakrishna (2014, Genome Res. 2014 June; 24(6):1020-7 for Cas9 in human cells). In other embodiments, the RNA targeting gene and/or guide RNA(s) are encoded by one or more circular or non-circular DNA molecule(s) which are coupled to one or more CPPs for plant protoplast delivery. The plant protoplasts are then regenerated to plant cells and further to plants. CPPs are generally described as short peptides of fewer than 35 amino acids either derived from proteins or from chimeric sequences which are capable of transporting biomolecules across cell membrane in a receptor independent manner. CPP can be cationic peptides, peptides having hydrophobic sequences, amphipatic peptides, peptides having proline-rich and anti-microbial sequence, and chimeric or bipartite peptides (Pooga and Langel 2005). CPPs are able to penetrate biological membranes and as such trigger the movement of various biomolecules across cell membranes into the cytoplasm and to improve their intracellular routing, and hence facilitate interaction of the biomolecule with the target. Examples of CPP include amongst others: Tat, a nuclear transcriptional activator protein required for viral replication by HIV type1, penetratin, Kaposi fibroblast growth factor (FGF) signal peptide sequence, integrin (33 signal peptide sequence; polyarginine peptide Args sequence, Guanine rich-molecular transporters, sweet arrow peptide, etc. . . . .

### Target RNA Envisaged for Plant, Algae or Fungal Applications

[0324] The target RNA, i.e. the RNA of interest, is the RNA to be targeted by the present invention leading to the recruitment to, and the binding of the RNA targeting protein at, the target site of interest on the target RNA. The target RNA may be any suitable form of RNA. This may include, in some embodiments, mRNA. In other embodiments, the target RNA may include transfer RNA (tRNA) or ribosomal RNA (rRNA), In other embodiments the target RNA may include interfering RNA (RNAi), microRNA (miRNA), microswitches, microzymes, satellite RNAs and RNA viruses. The target RNA may be located in the cytoplasm of the plant cell, or in the cell nucleus or in a plant cell organelle such as a mitochondrion, chloroplast or plastid.

[0325] In particular embodiments, the RNA targeting CRISPR system is used to cleave RNA or otherwise inhibit RNA expression.

### Use of RNA Targeting CRISPR System for Modulating Plant Gene Expression Via RNA Modulation

[0326] The RNA targeting protein may also be used, together with a suitable guide RNA, to target gene expression, via control of RNA processing. The control of RNA processing may include RNA processing reactions such as RNA splicing, including alternative splicing or specifically targeting certain splice variants or isoforms; viral replication (in particular of plant viruses, including virioids in plants and tRNA biosynthesis. The RNA targeting protein in combination with a suitable guide RNA may also be used to control RNA activation (RNAa). RNAa leads to the promotion of gene expression, so control of gene expression may be achieved that way through disruption or reduction of RNAa and thus less promotion of gene expression.

[0327] The RNA targeting effector protein of the invention can further be used for antiviral activity in plants, in particular against RNA viruses. The effector protein can be targeted to the viral RNA using a suitable guide RNA selective for a selected viral RNA sequence. In particular, the effector protein may be an active nuclease that cleaves RNA, such as single stranded RNA. provided is therefore the use of an RNA targeting effector protein of the invention as an antiviral agent. Examples of viruses that can be counteracted in this way include, but are not limited to, Tobacco mosaic virus (TMS′), Tomato spotted wilt virus (TSWV), Cucumber mosaic virus (CMV), Potato virus Y (PVY), Cauliflower mosaic virus (CaMV) (RT virus), Plum pox virus (PPV), Brome mosaic virus (BMV) and Potato virus X (PVX).

[0328] Examples of modulating RNA expression in plants, algae or fungi, as an alternative of targeted gene modification are described herein further.

[0329] Of particular interest is the regulated control of gene expression through regulated cleavage of mRNA. This can be achieved by placing elements of the RNA targeting under the control of regulated promoters as described herein.

Use of the RNA Targeting CRISPR System to Restore the Functionality of tRNA Molecules.

[0330] Pring et al describe RNA editing in plant mitochondria and chloroplasts that alters mRNA sequences to code for different proteins than the DNA. (Plant Mol. Biol. (1993) 21 (6): 1163-1170. doi:10.1007/BF00023611). In particular embodiments of the invention, the elements of the RNA targeting CRISPR system specifically targeting mitochondrial and chloroplast mRNA can be introduced in a plant or plant cell to express different proteins in such plant cell organelles mimicking the processes occurring in vivo.

### Use of the RNA Targeting CRISPR System as an Alternative to RNA Interference to Inhibit RNA Expression.

[0331] The RNA targeting CRISPR system has uses similar to RNA inhibition or RNA interference, thus can also be substituted for such methods. In particular embodiment, the methods of the present invention include the use of the RNA targeting CRISPR as a substitute for e.g. an interfering ribonucleic acid (such as an siRNA or shRNA or a dsRNA). Examples of inhibition of RNA expression in plants, algae or fungi as an alternative of targeted gene modification are described herein further.

### Use of the RNA Targeting CRISPR System to Control RNA Interference.

[0332] Control over interfering RNA or miRNA may help reduce off-target effects (OTE) seen with those approaches by reducing the longevity of the interfering RNA or miRNA in vivo or in vitro. In particular embodiments, the target RNA may include interfering RNA, i.e. RNA involved in an RNA interference pathway, such as shRNA, siRNA and so forth. In other embodiments, the target RNA may include microRNA (miRNA) or double stranded RNA (dsRNA).

[0333] In other particular embodiments, if the RNA targeting protein and suitable guide RNA(s) are selectively expressed (for example spatially or temporally under the control of a regulated promoter, for example a tissue- or cell cycle-specific promoter and/or enhancer) this can be used to ‘protect’ the cells or systems (in vivo or in vitro) from RNAi in those cells. This may be useful in neighbouring tissues or cells where RNAi is not required or for the purposes of comparison of the cells or tissues where the effector protein and suitable guide are and are not expressed (i.e. where the RNAi is not controlled and where it is, respectively). The RNA targeting protein may be used to control or bind to molecules comprising or consisting of RNA, such as ribozymes, ribosomes or riboswitches. In embodiments of the invention, the guide RNA can recruit the RNA targeting protein to these molecules so that the RNA targeting protein is able to bind to them.

[0334] The RNA targeting CRISPR system of the invention can be applied in areas of in-planta RNAi technologies, without undue experimentation, from this disclosure, including insect pest management, plant disease management and management of herbicide resistance, as well as in plant assay and for other applications (see, for instance Kim et al., in Pesticide Biochemistry and Physiology (Impact Factor: 2.01). January 2015; 120. DOI: 10.1016/j.pestbp.2015.01.002; Sharma et al. in Academic Journals (2015), Vol. 12(18) pp2303-2312); Green J. M, in Pest Management Science, Vol 70(9), pp 1351-1357), because the present application provides the foundation for informed engineering of the system.

### Use of RNA Targeting CRISPR System to Modify Riboswitches and Control Metabolic Regulation in Plants, Algae and Fungi

[0335] Riboswitches (also known as aptozymes) are regulatory segments of messenger RNA that bind small molecules and in turn regulate gene expression. This mechanism allows the cell to sense the intracellular concentration of these small molecules. A particular riboswitch typically regulates its adjacent gene by altering the transcription, the translation or the splicing of this gene. Thus, in particular embodiments of the present invention, control of riboswitch activity is envisaged through the use of the RNA targeting protein in combination with a suitable guide RNA to target the riboswitch. This may be through cleavage of, or binding to, the riboswitch. In particular embodiments, reduction of riboswitch activity is envisaged. Recently, a riboswitch that binds thiamin pyrophosphate (TPP) was characterized and found to regulate thiamin biosynthesis in plants and algae. Furthermore it appears that this element is an essential regulator of primary metabolism in plants (Bocobza and Aharoni, Plant J. 2014 August; 79(4):693-703. doi: 10.1111/tpj.12540. Epub 2014 Jun. 17). TPP riboswitches are also found in certain fungi, such as in Neurospora crassa, where it controls alternative splicing to conditionally produce an Upstream Open Reading Frame (uORF), thereby affecting the expression of downstream genes (Cheah M T et al., (2007) Nature 447 (7143): 497-500. doi:10.1038/nature05769) The RNA targeting CRISPR system described herein may be used to manipulate the endogenous riboswitch activity in plants, algae or fungi and as such alter the expression of downstream genes controlled by it. In particular embodiments, the RNA targeting CRISPR system may be used in assaying riboswitch function in vivo or in vitro and in studying its relevance for the metabolic network. In particular embodiments the RNA targeting CRISPR system may potentially be used for engineering of riboswitches as metabolite sensors in plants and platforms for gene control.

Use of RNA targeting CRISPR system in RNAi Screens for plants, algae or fungi

[0336] Identifying gene products whose knockdown is associated with phenotypic changes, biological pathways can be interrogated and the constituent parts identified, via RNAi screens. In particular embodiments of the invention, control may also be exerted over or during these screens by use of the Cas13b protein and suitable guide RNA described herein to remove or reduce the activity of the RNAi in the screen and thus reinstate the activity of the (previously interfered with) gene product (by removing or reducing the interference/repression).

### Use of RNA Targeting Proteins for Visualization of RNA Molecules In Vivo and In Vitro

[0337] In particular embodiments, the invention provides a nucleic acid binding system. In situ hybridization of RNA with complementary probes is a powerful technique. Typically fluorescent DNA oligonucleotides are used to detect nucleic acids by hybridization. Increased efficiency has been attained by certain modifications, such as locked nucleic acids (LNAs), but there remains a need for efficient and versatile alternatives. As such, labelled elements of the RNA targeting system can be used as an alternative for efficient and adaptable system for in situ hybridization

### Further Applications of the RNA Targeting CRISPR System in Plants and Yeasts

### Use of RNA Targeting CRISPR System in Biofuel Production

[0338] The term “biofuel” as used herein is an alternative fuel made from plant and plant-derived resources. Renewable biofuels can be extracted from organic matter whose energy has been obtained through a process of carbon fixation or are made through the use or conversion of biomass. This biomass can be used directly for biofuels or can be converted to convenient energy containing substances by thermal conversion, chemical conversion, and biochemical conversion. This biomass conversion can result in fuel in solid, liquid, or gas form. There are two types of biofuels: bioethanol and biodiesel. Bioethanol is mainly produced by the sugar fermentation process of cellulose (starch), which is mostly derived from maize and sugar cane. Biodiesel on the other hand is mainly produced from oil crops such as rapeseed, palm, and soybean. Biofuels are used mainly for transportation.

### Enhancing Plant Properties for Biofuel Production

[0339] In particular embodiments, the methods using the RNA targeting CRISPR system as described herein are used to alter the properties of the cell wall in order to facilitate access by key hydrolysing agents for a more efficient release of sugars for fermentation. In particular embodiments, the biosynthesis of cellulose and/or lignin are modified. Cellulose is the major component of the cell wall. The biosynthesis of cellulose and lignin are co-regulated. By reducing the proportion of lignin in a plant the proportion of cellulose can be increased. In particular embodiments, the methods described herein are used to downregulate lignin biosynthesis in the plant so as to increase fermentable carbohydrates. More particularly, the methods described herein are used to downregulate at least a first lignin biosynthesis gene selected from the group consisting of 4-coumarate 3-hydroxylase (C3H), phenylalanine ammonia-lyase (PAL), cinnamate 4-hydroxylase (C4H), hydroxycinnamoyl transferase (HCT), caffeic acid O-methyltransferase (COMT), caffeoyl CoA 3-O-methyltransferase (CCoAOMT), ferulate 5-hydroxylase (F5H), cinnamyl alcohol dehydrogenase (CAD), cinnamoyl CoA-reductase (CCR), 4-coumarate-CoA ligase (4CL), monolignol-lignin-specific glycosyltransferase, and aldehyde dehydrogenase (ALDH) as disclosed in WO 2008064289 A2.

[0340] In particular embodiments, the methods described herein are used to produce plant mass that produces lower levels of acetic acid during fermentation (see also WO 2010096488).

### Modifying Yeast for Biofuel Production

[0341] In particular embodiments, the RNA targeting enzyme provided herein is used for bioethanol production by recombinant micro-organisms. For instance, RNA targeting enzymes can be used to engineer micro-organisms, such as yeast, to generate biofuel or biopolymers from fermentable sugars and optionally to be able to degrade plant-derived lignocellulose derived from agricultural waste as a source of fermentable sugars. More particularly, the invention provides methods whereby the RNA targeting CRISPR complex is used to modify the expression of endogenous genes required for biofuel production and/or to modify endogenous genes why may interfere with the biofuel synthesis. More particularly the methods involve stimulating the expression in a micro-organism such as a yeast of one or more nucleotide sequence encoding enzymes involved in the conversion of pyruvate to ethanol or another product of interest. In particular embodiments the methods ensure the stimulation of expression of one or more enzymes which allows the micro-organism to degrade cellulose, such as a cellulase. In yet further embodiments, the RNA targeting CRISPR complex is used to suppress endogenous metabolic pathways which compete with the biofuel production pathway.

### Modifying Algae and Plants for Production of Vegetable Oils or Biofuels

[0342] Transgenic algae or other plants such as rape may be particularly useful in the production of vegetable oils or biofuels such as alcohols (especially methanol and ethanol), for instance. These may be engineered to express or overexpress high levels of oil or alcohols for use in the oil or biofuel industries.

[0343] U.S. Pat. No. 8,945,839 describes a method for engineering Micro-Algae (Chlamydomonas reinhardtii cells) using Cas9. Using similar tools, the methods of the RNA targeting CRISPR system described herein can be applied on Chlamydomonas species and other algae. In particular embodiments, the RNA targeting effector protein and guide RNA are introduced in algae expressed using a vector that expresses the RNA targeting effector protein under the control of a constitutive promoter such as Hsp70A-Rbc S2 or Beta2-tubulin. Guide RNA will be delivered using a vector containing T7 promoter. Alternatively, in vitro transcribed guide RNA can be delivered to algae cells. Electroporation protocol follows standard recommended protocol from the GeneArt Chlamydomonas Engineering kit.

### Particular Applications of the RNA Targeting Enzymes in Plants

[0344] In particular embodiments, present invention can be used as a therapy for virus removal in plant systems as it is able to cleave viral RNA. Previous studies in human systems have demonstrated the success of utilizing CRISPR in targeting the single strand RNA virus, hepatitis C (A. Price, et al., Proc. Natl. Acad. Sci, 2015). These methods may also be adapted for using the RNA targeting CRISPR system in plants.

### Improved Plants

[0345] The present invention also provides plants and yeast cells obtainable and obtained by the methods provided herein. The improved plants obtained by the methods described herein may be useful in food or feed production through the modified expression of genes which, for instance ensure tolerance to plant pests, herbicides, drought, low or high temperatures, excessive water, etc.

[0346] The improved plants obtained by the methods described herein, especially crops and algae may be useful in food or feed production through expression of, for instance, higher protein, carbohydrate, nutrient or vitamin levels than would normally be seen in the wildtype. In this regard, improved plants, especially pulses and tubers are preferred.

[0347] Improved algae or other plants such as rape may be particularly useful in the production of vegetable oils or biofuels such as alcohols (especially methanol and ethanol), for instance. These may be engineered to express or overexpress high levels of oil or alcohols for use in the oil or biofuel industries.

[0348] The invention also provides for improved parts of a plant. Plant parts include, but are not limited to, leaves, stems, roots, tubers, seeds, endosperm, ovule, and pollen. Plant parts as envisaged herein may be viable, nonviable, regeneratable, and/or non-regeneratable.

[0349] It is also encompassed herein to provide plant cells and plants generated according to the methods of the invention. Gametes, seeds, embryos, either zygotic or somatic, progeny or hybrids of plants comprising the genetic modification, which are produced by traditional breeding methods, are also included within the scope of the present invention. Such plants may contain a heterologous or foreign DNA sequence inserted at or instead of a target sequence. Alternatively, such plants may contain only an alteration (mutation, deletion, insertion, substitution) in one or more nucleotides. As such, such plants will only be different from their progenitor plants by the presence of the particular modification.

[0350] In an embodiment of the invention, a Cas13b system is used to engineer pathogen resistant plants, for example by creating resistance against diseases caused by bacteria, fungi or viruses. In certain embodiments, pathogen resistance can be accomplished by engineering crops to produce a Cas13b system that wil be ingested by an insect pest, leading to mortality. In an embodiment of the invention, a Cas13b system is used to engineer abiotic stress tolerance. In another embodiment, a Cas13b system is used to engineer drought stress tolerance or salt stress tolerance, or cold or heat stress tolerance. Younis et al. 2014, Int. J. Biol. Sci. 10; 1150 reviewed potential targets of plant breeding methods, all of which are amenable to correction or improvement through use of a Cas13b system described herein. Some non-limiting target crops include Oryza sativa L, Prunus domestica L., Gossypium hirsutum, Nicotiana rustica, Zea mays, Medicago sativa, Nicotiana benthamiana and Arabidopsis thaliana

[0351] In an embodiment of the invention, a Cas13b system is used for management of crop pests. For example, a Cas13b system operable in a crop pest can be expressed from a plant host or transferred directly to the target, for example using a viral vector.

[0352] In an embodiment, the invention provides a method of efficiently producing homozygous organisms from a heterozygous non-human starting organism. In an embodiment, the invention is used in plant breeding. In another embodiment, the invention is used in animal breeding. In such embodiments, a homozygous organism such as a plant or animal is made by preventing or suppressing recombination by interfering with at least one target gene involved in double strand breaks, chromosome pairing and/or strand exchange.

### Application of the Cas13b Proteins in Optimized Functional RNA Targeting Systems

[0353] In an aspect the invention provides a system for specific delivery of functional components to the RNA environment. This can be ensured using the CRISPR systems comprising the RNA targeting effector proteins of the present invention which allow specific targeting of different components to RNA. More particularly such components include activators or repressors, such as activators or repressors of RNA translation, degradation, etc. Applications of this system are described elsewhere herein.

[0354] According to one aspect the invention provides non-naturally occurring or engineered composition comprising a guide RNA comprising a guide sequence capable of hybridizing to a target sequence in a genomic locus of interest in a cell, wherein the guide RNA is modified by the insertion of one or more distinct RNA sequence(s) that bind an adaptor protein. In particular embodiments, the RNA sequences may bind to two or more adaptor proteins (e.g. aptamers), and wherein each adaptor protein is associated with one or more functional domains. The guide RNAs of the Cas13b enzymes described herein are shown to be amenable to modification of the guide sequence. In particular embodiments, the guide RNA is modified by the insertion of distinct RNA sequence(s) 5′ of the direct repeat, within the direct repeat, or 3′ of the guide sequence. When there is more than one functional domain, the functional domains can be same or different, e.g., two of the same or two different activators or repressors. In an aspect the invention provides a herein-discussed composition, wherein the one or more functional domains are attached to the RNA targeting enzyme so that upon binding to the target RNA the functional domain is in a spatial orientation allowing for the functional domain to function in its attributed function; In an aspect the invention provides a herein-discussed composition, wherein the composition comprises a CRISPR-Cas complex having at least three functional domains, at least one of which is associated with the RNA targeting enzyme and at least two of which are associated with the gRNA.

[0355] Accordingly, in an aspect the invention provides non-naturally occurring or engineered CRISPR-Cas13b complex composition comprising the guide RNA as herein-discussed and a Cas13b which is an RNA targeting enzyme, wherein optionally the RNA targeting enzyme comprises at least one mutation, such that the RNA targeting enzyme has no more than 5% of the nuclease activity of the enzyme not having the at least one mutation, and optionally one or more comprising at least one or more nuclear localization sequences. In particular embodiments, the guide RNA is additionally or alternatively modified so as to still ensure binding of the RNA targeting enzyme but to prevent cleavage by the RNA targeting enzyme (as detailed elsewhere herein).

[0356] In particular embodiments, the RNA targeting enzyme is a Cas13b enzyme which has a diminished nuclease activity of at least 97%, or 100% as compared with the Cas13b enzyme not having the at least one mutation. In an aspect the invention provides a herein-discussed composition, wherein the Cas13b enzyme comprises two or more mutations as otherwise herein-discussed.

[0357] In particular embodiments, an RNA targeting system is provided as described herein above comprising two or more functional domains. In particular embodiments, the two or more functional domains are heterologous functional domain. In particular embodiments, the system comprises an adaptor protein which is a fusion protein comprising a functional domain, the fusion protein optionally comprising a linker between the adaptor protein and the functional domain. In particular embodiments, the linker includes a GlySer linker. Additionally or alternatively, one or more functional domains are attached to the RNA effector protein by way of a linker, optionally a GlySer linker. In particular embodiments, the one or more functional domains are attached to the RNA targeting enzyme through one or both of the HEPN domains.

[0358] In an aspect the invention provides a herein-discussed composition, wherein the one or more functional domains associated with the adaptor protein or the RNA targeting enzume is a domain capable of activating or repressing RNA translation. In an aspect the invention provides a herein-discussed composition, wherein at least one of the one or more functional domains associated with the adaptor protein have one or more activities comprising methylase activity, demethylase activity, transcription activation activity, transcription repression activity, transcription release factor activity, histone modification activity, DNA integration activity RNA cleavage activity, DNA cleavage activity or nucleic acid binding activity, or molecular switch activity or chemical inducibility or light inducibility.

[0359] In an aspect the invention provides a herein-discussed composition comprising an aptamer sequence. In particular embodiments, the aptamer sequence is two or more aptamer sequences specific to the same adaptor protein. In an aspect the invention provides a herein-discussed composition, wherein the aptamer sequence is two or more aptamer sequences specific to different adaptor protein. In an aspect the invention provides a herein-discussed composition, wherein the adaptor protein comprises MS2, PP7, Qβ, F2, GA, fr, JP501, M12, R17, BZ13, JP34, JP500, KU1, M11, MX1, TW18, VK, SP, FI, ID2, NL95, TW19, AP205, ϕCb5, ϕCb8r, ϕCb 12r, ϕCb23r, 7s, PRR1. Accordingly, in particular embodiments, the aptamer is selected from a binding protein specifically binding any one of the adaptor proteins listed above. In an aspect the invention provides a herein-discussed composition, wherein the cell is a eukaryotic cell. In an aspect the invention provides a herein-discussed composition, wherein the eukaryotic cell is a mammalian cell, a plant cell or a yeast cell, whereby the mammalian cell is optionally a mouse cell. In an aspect the invention provides a herein-discussed composition, wherein the mammalian cell is a human cell.

[0360] In an aspect the invention provides a herein above-discussed composition wherein there is more than one gRNA, and the gRNAs target different sequences whereby when the composition is employed, there is multiplexing. In an aspect the invention provides a composition wherein there is more than one gRNA modified by the insertion of distinct RNA sequence(s) that bind to one or more adaptor proteins.

[0361] In an aspect the invention provides a herein-discussed composition wherein one or more adaptor proteins associated with one or more functional domains is present and bound to the distinct RNA sequence(s) inserted into the guide RNA(s).

[0362] In an aspect the invention provides a herein-discussed composition wherein the guide RNA is modified to have at least one non-coding functional loop; e.g., wherein the at least one non-coding functional loop is repressive; for instance, wherein at least one non-coding functional loop comprises Alu.

[0363] In an aspect the invention provides a method for modifying gene expression comprising the administration to a host or expression in a host in vivo of one or more of the compositions as herein-discussed.

[0364] In an aspect the invention provides a herein-discussed method comprising the delivery of the composition or nucleic acid molecule(s) coding therefor, wherein said nucleic acid molecule(s) are operatively linked to regulatory sequence(s) and expressed in vivo. In an aspect the invention provides a herein-discussed method wherein the expression in vivo is via a lentivirus, an adenovirus, or an AAV.

[0365] In an aspect the invention provides a mammalian cell line of cells as herein-discussed, wherein the cell line is, optionally, a human cell line or a mouse cell line. In an aspect the invention provides a transgenic mammalian model, optionally a mouse, wherein the model has been transformed with a herein-discussed composition or is a progeny of said transformant.

[0366] In an aspect the invention provides a nucleic acid molecule(s) encoding guide RNA or the RNA targeting CRISPR-Cas complex or the composition as herein-discussed. In an aspect the invention provides a vector comprising: a nucleic acid molecule encoding a guide RNA (gRNA) comprising a guide sequence capable of hybridizing to a target sequence in a genomic locus of interest in a cell, wherein the direct repeat of the gRNA is modified by the insertion of distinct RNA sequence(s) that bind(s) to two or more adaptor proteins, and wherein each adaptor protein is associated with one or more functional domains; or, wherein the gRNA is modified to have at least one non-coding functional loop. In an aspect the invention provides vector(s) comprising nucleic acid molecule(s) encoding: non-naturally occurring or engineered CRISPR-Cas complex composition comprising the gRNA herein-discussed, and an RNA targeting enzyme, wherein optionally the RNA targeting enzyme comprises at least one mutation, such that the RNA targeting enzyme has no more than 5% of the nuclease activity of the RNA targeting enzyme not having the at least one mutation, and optionally one or more comprising at least one or more nuclear localization sequences. In an aspect a vector can further comprise regulatory element(s) operable in a eukaryotic cell operably linked to the nucleic acid molecule encoding the guide RNA (gRNA) and/or the nucleic acid molecule encoding the RNA targeting enzyme and/or the optional nuclear localization sequence(s).

[0367] In one aspect, the invention provides a kit comprising one or more of the components described hereinabove. In some embodiments, the kit comprises a vector system as described above and instructions for using the kit.

[0368] In an aspect the invention provides a method of screening for gain of function (GOF) or loss of function (LOF) or for screening non-coding RNAs or potential regulatory regions (e.g. enhancers, repressors) comprising the cell line of as herein-discussed or cells of the model herein-discussed containing or expressing the RNA targeting enzyme and introducing a composition as herein-discussed into cells of the cell line or model, whereby the gRNA includes either an activator or a repressor, and monitoring for GOF or LOF respectively as to those cells as to which the introduced gRNA includes an activator or as to those cells as to which the introduced gRNA includes a repressor.

[0369] In an aspect the invention provides a library of non-naturally occurring or engineered compositions, each comprising a RNA targeting CRISPR guide RNA (gRNA) comprising a guide sequence capable of hybridizing to a target RNA sequence of interest in a cell, an RNA targeting enzyme, wherein the RNA targeting enzyme comprises at least one mutation, such that the RNA targeting enzyme has no more than 5% of the nuclease activity of the RNA targeting enzyme not having the at least one mutation, wherein the gRNA is modified by the insertion of distinct RNA sequence(s) that bind to one or more adaptor proteins, and wherein the adaptor protein is associated with one or more functional domains, wherein the composition comprises one or more or two or more adaptor proteins, wherein the each protein is associated with one or more functional domains, and wherein the gRNAs comprise a genome wide library comprising a plurality of RNA targeting guide RNAs (gRNAs). In an aspect the invention provides a library as herein-discussed, wherein the RNA targeting RNA targeting enzyme has a diminished nuclease activity of at least 97%, or 100% as compare with the RNA targeting enzyme not having the at least one mutation. In an aspect the invention provides a library as herein-discussed, wherein the adaptor protein is a fusion protein comprising the functional domain. In an aspect the invention provides a library as herein discussed, wherein the gRNA is not modified by the insertion of distinct RNA sequence(s) that bind to the one or two or more adaptor proteins. In an aspect the invention provides a library as herein discussed, wherein the one or two or more functional domains are associated with the RNA targeting enzyme. In an aspect the invention provides a library as herein discussed, wherein the cell population of cells is a population of eukaryotic cells. In an aspect the invention provides a library as herein discussed, wherein the eukaryotic cell is a mammalian cell, a plant cell or a yeast cell. In an aspect the invention provides a library as herein discussed, wherein the mammalian cell is a human cell. In an aspect the invention provides a library as herein discussed, wherein the population of cells is a population of embryonic stem (ES) cells.

[0370] In an aspect the invention provides a library as herein discussed, wherein the targeting is of about 100 or more RNA sequences. In an aspect the invention provides a library as herein discussed, wherein the targeting is of about 1000 or more RNA sequences. In an aspect the invention provides a library as herein discussed, wherein the targeting is of about 20,000 or more sequences. In an aspect the invention provides a library as herein discussed, wherein the targeting is of the entire transcriptome. In an aspect the invention provides a library as herein discussed, wherein the targeting is of a panel of target sequences focused on a relevant or desirable pathway. In an aspect the invention provides a library as herein discussed, wherein the pathway is an immune pathway. In an aspect the invention provides a library as herein discussed, wherein the pathway is a cell division pathway.

[0371] In one aspect, the invention provides a method of generating a model eukaryotic cell comprising a gene with modified expression. In some embodiments, a disease gene is any gene associated an increase in the risk of having or developing a disease. In some embodiments, the method comprises (a) introducing one or more vectors encoding the components of the system described herein above into a eukaryotic cell, and (b) allowing a CRISPR complex to bind to a target polynucleotide so as to modify expression of a gene, thereby generating a model eukaryotic cell comprising modified gene expression.

[0372] The structural information provided herein allows for interrogation of guide RNA interaction with the target RNA and the RNA targeting enzyme permitting engineering or alteration of guide RNA structure to optimize functionality of the entire RNA targeting CRISPR-Cas system. For example, the guide RNA may be extended, without colliding with the RNA targeting protein by the insertion of adaptor proteins that can bind to RNA. These adaptor proteins can further recruit effector proteins or fusions which comprise one or more functional domains.

[0373] An aspect of the invention is that the above elements are comprised in a single composition or comprised in individual compositions. These compositions may advantageously be applied to a host to elicit a functional effect on the genomic level.

[0374] The skilled person will understand that modifications to the guide RNA which allow for binding of the adapter+functional domain but not proper positioning of the adapter+functional domain (e.g. due to steric hindrance within the three dimensional structure of the CRISPR complex) are modifications which are not intended. The one or more modified guide RNA may be modified, by introduction of a distinct RNA sequence(s) 5′ of the direct repeat, within the direct repeat, or 3′ of the guide sequence.

[0375] The modified guide RNA, the inactivated RNA targeting enzyme (with or without functional domains), and the binding protein with one or more functional domains, may each individually be comprised in a composition and administered to a host individually or collectively. Alternatively, these components may be provided in a single composition for administration to a host. Administration to a host may be performed via viral vectors known to the skilled person or described herein for delivery to a host (e.g. lentiviral vector, adenoviral vector, AAV vector). As explained herein, use of different selection markers (e.g. for lentiviral gRNA selection) and concentration of gRNA (e.g. dependent on whether multiple gRNAs are used) may be advantageous for eliciting an improved effect.

[0376] Using the provided compositions, the person skilled in the art can advantageously and specifically target single or multiple loci with the same or different functional domains to elicit one or more genomic events. The compositions may be applied in a wide variety of methods for screening in libraries in cells and functional modeling in vivo (e.g. gene activation of lincRNA and indentification of function; gain-of-function modeling; loss-of-function modeling; the use the compositions of the invention to establish cell lines and transgenic animals for optimization and screening purposes).

[0377] The current invention comprehends the use of the compositions of the current invention to establish and utilize conditional or inducible CRISPR RNA targeting events. (See, e.g., Platt et al., Cell (2014), http://dx.doi.org/10.1016/j.cell.2014.09.014, or PCT patent publications cited herein, such as WO 2014/093622 (PCT/US2013/074667), which are not believed prior to the present invention or application). For example, the target cell comprises RNA targeting CRISPR enzyme conditionally or inducibly (e.g. in the form of Cre dependent constructs) and/or the adapter protein conditionally or inducibly and, on expression of a vector introduced into the target cell, the vector expresses that which induces or gives rise to the condition of s RNA targeting enzyme expression and/or adaptor expression in the target cell. By applying the teaching and compositions of the current invention with the known method of creating a CRISPR complex, inducible gene expression affected by functional domains are also an aspect of the current invention. Alternatively, the adaptor protein may be provided as a conditional or inducible element with a conditional or inducible s RNA targeting enzyme to provide an effective model for screening purposes, which advantageously only requires minimal design and administration of specific gRNAs for a broad number of applications.

### Guide RNA According to the Invention Comprising a Dead Guide Sequence

[0378] In one aspect, the invention provides guide sequences which are modified in a manner which allows for formation of the CRISPR complex and successful binding to the target, while at the same time, not allowing for successful nuclease activity (i.e. without nuclease activity/without indel activity). For matters of explanation such modified guide sequences are referred to as “dead guides” or “dead guide sequences”. These dead guides or dead guide sequences can be thought of as catalytically inactive or conformationally inactive with regard to nuclease activity. Indeed, dead guide sequences may not sufficiently engage in productive base pairing with respect to the ability to promote catalytic activity or to distinguish on-target and off-target binding activity. Briefly, the assay involves synthesizing a CRISPR target RNA and guide RNAs comprising mismatches with the target RNA, combining these with the RNA targeting enzyme and analyzing cleavage based on gels based on the presence of bands generated by cleavage products, and quantifying cleavage based upon relative band intensities.

[0379] Hence, in a related aspect, the invention provides a non-naturally occurring or engineered composition RNA targeting CRISPR-Cas system comprising a functional RNA targeting as described herein, and guide RNA (gRNA) wherein the gRNA comprises a dead guide sequence whereby the gRNA is capable of hybridizing to a target sequence such that the RNA targeting CRISPR-Cas system is directed to a genomic locus of interest in a cell without detectable RNA cleavage activity of a non-mutant RNA targeting enzyme of the system. It is to be understood that any of the gRNAs according to the invention as described herein elsewhere may be used as dead gRNAs/gRNAs comprising a dead guide sequence as described herein below. Any of the methods, products, compositions and uses as described herein elsewhere is equally applicable with the dead gRNAs/gRNAs comprising a dead guide sequence as further detailed below. By means of further guidance, the following particular aspects and embodiments are provided.

[0380] The ability of a dead guide sequence to direct sequence-specific binding of a CRISPR complex to an RNA target sequence may be assessed by any suitable assay. For example, the components of a CRISPR system sufficient to form a CRISPR complex, including the dead guide sequence to be tested, may be provided to a host cell having the corresponding target sequence, such as by transfection with vectors encoding the components of the CRISPR sequence, followed by an assessment of preferential cleavage within the target sequence. For instance, cleavage of a target RNA polynucleotide sequence may be evaluated in a test tube by providing the target sequence, components of a CRISPR complex, including the dead guide sequence to be tested and a control guide sequence different from the test dead guide sequence, and comparing binding or rate of cleavage at the target sequence between the test and control guide sequence reactions. Other assays are possible, and will occur to those skilled in the art. A dead guide sequence may be selected to target any target sequence. In some embodiments, the target sequence is a sequence within a genome of a cell.

[0381] As explained further herein, several structural parameters allow for a proper framework to arrive at such dead guides. Dead guide sequences are typically shorter than respective guide sequences which result in active RNA cleavage. In particular embodiments, dead guides are 5%, 10%, 20%, 30%, 40%, 50%, shorter than respective guides directed to the same.

[0382] As explained below and known in the art, one aspect of gRNA-RNA targeting specificity is the direct repeat sequence, which is to be appropriately linked to such guides. In particular, this implies that the direct repeat sequences are designed dependent on the origin of the RNA targeting enzyme. Thus, structural data available for validated dead guide sequences may be used for designing Cas13b specific equivalents. Structural similarity between, e.g., the orthologous nuclease domains HEPN of two or more Cas13b effector proteins may be used to transfer design equivalent dead guides. Thus, the dead guide herein may be appropriately modified in length and sequence to reflect such Cas13b specific equivalents, allowing for formation of the CRISPR complex and successful binding to the target RNA, while at the same time, not allowing for successful nuclease activity.

[0383] The use of dead guides in the context herein as well as the state of the art provides a surprising and unexpected platform for network biology and/or systems biology in both in vitro, ex vivo, and in vivo applications, allowing for multiplex gene targeting, and in particular bidirectional multiplex gene targeting. Prior to the use of dead guides, addressing multiple targets has been challenging and in some cases not possible. With the use of dead guides, multiple targets, and thus multiple activities, may be addressed, for example, in the same cell, in the same animal, or in the same patient. Such multiplexing may occur at the same time or staggered for a desired timeframe.

[0384] For example, the dead guides allow to use gRNA as a means for gene targeting, without the consequence of nuclease activity, while at the same time providing directed means for activation or repression. Guide RNA comprising a dead guide may be modified to further include elements in a manner which allow for activation or repression of gene activity, in particular protein adaptors (e.g. aptamers) as described herein elsewhere allowing for functional placement of gene effectors (e.g. activators or repressors of gene activity). One example is the incorporation of aptamers, as explained herein and in the state of the art. By engineering the gRNA comprising a dead guide to incorporate protein-interacting aptamers (Konermann et al., “Genome-scale transcription activation by an engineered CRISPR-Cas9 complex,” doi:10.1038/nature14136, incorporated herein by reference), one may assemble multiple distinct effector domains. Such may be modeled after natural processes.

### General Provisions

[0385] In an aspect, the invention provides a nucleic acid binding system. In situ hybridization of RNA with complementary probes is a powerful technique. Typically fluorescent DNA oligonucleotides are used to detect nucleic acids by hybridization. Increased efficiency has been attained by certain modifications, such as locked nucleic acids (LNAs), but there remains a need for efficient and versatile alternatives. The invention provides an efficient and adaptable system for in situ hybridization.

[0386] In embodiments of the invention the terms guide sequence and guide RNA are used interchangeably as in foregoing cited documents such as WO 2014/093622 (PCT/US2013/074667). In general, a guide sequence is any polynucleotide sequence having sufficient complementarity with a target polynucleotide sequence to hybridize with the target sequence and direct sequence-specific binding of a CRISPR complex to the target sequence. In some embodiments, the degree of complementarity between a guide sequence and its corresponding target sequence, when optimally aligned using a suitable alignment algorithm, is about or more than about 50%, 60%, 75%, 80%, 85%, 90%, 95%, 97.5%, 99%, or more. Optimal alignment may be determined with the use of any suitable algorithm for aligning sequences, non-limiting example of which include the Smith-Waterman algorithm, the Needleman-Wunsch algorithm, algorithms based on the Burrows-Wheeler Transform (e.g., the Burrows Wheeler Aligner), ClustalW, Clustal X, BLAT, Novoalign (Novocraft Technologies; available at www.novocraft.com), ELAND (Illumina, San Diego, Calif.), SOAP (available at soap.genomics.org.cn), and Maq (available at maq.sourceforge.net). In some embodiments, a guide sequence is about or more than about 5, 10, 11, 12, 13, 14, 15, 16, 17, 18, 19, 20, 21, 22, 23, 24, 25, 26, 27, 28, 29, 30, 35, 40, 45, 50, 75, or more nucleotides in length. In some embodiments, a guide sequence is less than about 75, 50, 45, 40, 35, 30, 25, 20, 15, 12, or fewer nucleotides in length. Preferably the guide sequence is 10-30 nucleotides long. The ability of a guide sequence to direct sequence-specific binding of a CRISPR complex to a target sequence may be assessed by any suitable assay. For example, the components of a CRISPR system sufficient to form a CRISPR complex, including the guide sequence to be tested, may be provided to a host cell having the corresponding target sequence, such as by transfection with vectors encoding the components of the CRISPR sequence, followed by an assessment of preferential cleavage within the target sequence, such as by Surveyor assay as described herein. Similarly, cleavage of a target polynucleotide sequence may be evaluated in a test tube by providing the target sequence, components of a CRISPR complex, including the guide sequence to be tested and a control guide sequence different from the test guide sequence, and comparing binding or rate of cleavage at the target sequence between the test and control guide sequence reactions. Other assays are possible, and will occur to those skilled in the art. A guide sequence may be selected to target any target sequence. In some embodiments, the target sequence is a sequence within a genome of a cell. Exemplary target sequences include those that are unique in the target genome.

[0387] In general, and throughout this specification, the term “vector” refers to a nucleic acid molecule capable of transporting another nucleic acid to which it has been linked. Vectors include, but are not limited to, nucleic acid molecules that are single-stranded, double-stranded, or partially double-stranded; nucleic acid molecules that comprise one or more free ends, no free ends (e.g., circular); nucleic acid molecules that comprise DNA, RNA, or both; and other varieties of polynucleotides known in the art. One type of vector is a “plasmid,” which refers to a circular double stranded DNA loop into which additional DNA segments can be inserted, such as by standard molecular cloning techniques. Another type of vector is a viral vector, wherein virally-derived DNA or RNA sequences are present in the vector for packaging into a virus (e.g., retroviruses, replication defective retroviruses, adenoviruses, replication defective adenoviruses, and adeno-associated viruses). Viral vectors also include polynucleotides carried by a virus for transfection into a host cell. Certain vectors are capable of autonomous replication in a host cell into which they are introduced (e.g., bacterial vectors having a bacterial origin of replication and episomal mammalian vectors). Other vectors (e.g., non-episomal mammalian vectors) are integrated into the genome of a host cell upon introduction into the host cell, and thereby are replicated along with the host genome. Moreover, certain vectors are capable of directing the expression of genes to which they are operatively-linked. Such vectors are referred to herein as “expression vectors.” Vectors for and that result in expression in a eukaryotic cell can be referred to herein as “eukaryotic expression vectors.” Common expression vectors of utility in recombinant DNA techniques are often in the form of plasmids.

[0388] Recombinant expression vectors can comprise a nucleic acid of the invention in a form suitable for expression of the nucleic acid in a host cell, which means that the recombinant expression vectors include one or more regulatory elements, which may be selected on the basis of the host cells to be used for expression, that is operatively-linked to the nucleic acid sequence to be expressed. Within a recombinant expression vector, “operably linked” is intended to mean that the nucleotide sequence of interest is linked to the regulatory element(s) in a manner that allows for expression of the nucleotide sequence (e.g., in an in vitro transcription/translation system or in a host cell when the vector is introduced into the host cell).

[0389] The term “regulatory element” is intended to include promoters, enhancers, internal ribosomal entry sites (IRES), and other expression control elements (e.g., transcription termination signals, such as polyadenylation signals and poly-U sequences). Such regulatory elements are described, for example, in Goeddel, GENE EXPRESSION TECHNOLOGY: METHODS IN ENZYMOLOGY 185, Academic Press, San Diego, Calif. (1990). Regulatory elements include those that direct constitutive expression of a nucleotide sequence in many types of host cell and those that direct expression of the nucleotide sequence only in certain host cells (e.g., tissue-specific regulatory sequences). A tissue-specific promoter may direct expression primarily in a desired tissue of interest, such as muscle, neuron, bone, skin, blood, specific organs (e.g., liver, pancreas), or particular cell types (e.g., lymphocytes). Regulatory elements may also direct expression in a temporal-dependent manner, such as in a cell-cycle dependent or developmental stage-dependent manner, which may or may not also be tissue or cell-type specific. In some embodiments, a vector comprises one or more pol III promoter (e.g., 1, 2, 3, 4, 5, or more pol III promoters), one or more pol II promoters (e.g., 1, 2, 3, 4, 5, or more pol II promoters), one or more pol I promoters (e.g., 1, 2, 3, 4, 5, or more pol I promoters), or combinations thereof. Examples of pol III promoters include, but are not limited to, U6 and H1 promoters. Examples of pol II promoters include, but are not limited to, the retroviral Rous sarcoma virus (RSV) LTR promoter (optionally with the RSV enhancer), the cytomegalovirus (CMV) promoter (optionally with the CMV enhancer) [see, e.g., Boshart et al, Cell, 41:521-530 (1985)], the SV40 promoter, the dihydrofolate reductase promoter, the β-actin promoter, the phosphoglycerol kinase (PGK) promoter, and the EF1α promoter. Also encompassed by the term “regulatory element” are enhancer elements, such as WPRE; CMV enhancers; the R-U5′ segment in LTR of HTLV-I (Mol. Cell. Biol., Vol. 8(1), p. 466-472, 1988); SV40 enhancer; and the intron sequence between exons 2 and 3 of rabbit β-globin (Proc. Natl. Acad. Sci. USA., Vol. 78(3), p. 1527-31, 1981). It will be appreciated by those skilled in the art that the design of the expression vector can depend on such factors as the choice of the host cell to be transformed, the level of expression desired, etc. A vector can be introduced into host cells to thereby produce transcripts, proteins, or peptides, including fusion proteins or peptides, encoded by nucleic acids as described herein (e.g., clustered regularly interspersed short palindromic repeats (CRISPR) transcripts, proteins, enzymes, mutant forms thereof, fusion proteins thereof, etc.).

[0390] Advantageous vectors include lentiviruses and adeno-associated viruses, and types of such vectors can also be selected for targeting particular types of cells.

[0391] As used herein, the term “crRNA” or “guide RNA” or “single guide RNA” or “sgRNA” or “one or more nucleic acid components” of a Type V or Type VI CRISPR-Cas locus effector protein comprises any polynucleotide sequence having sufficient complementarity with a target nucleic acid sequence to hybridize with the target nucleic acid sequence and direct sequence-specific binding of a nucleic acid-targeting complex to the target nucleic acid sequence.

[0392] In certain embodiments, the CRISPR system as provided herein can make use of a crRNA or analogous polynucleotide comprising a guide sequence, wherein the polynucleotide is an RNA, a DNA or a mixture of RNA and DNA, and/or wherein the polynucleotide comprises one or more nucleotide analogs. The sequence can comprise any structure, including but not limited to a structure of a native crRNA, such as a bulge, a hairpin or a stem loop structure. In certain embodiments, the polynucleotide comprising the guide sequence forms a duplex with a second polynucleotide sequence which can be an RNA or a DNA sequence.

[0393] In certain embodiments, use is made of chemically modified guide RNAs. Examples of guide RNA chemical modifications include, without limitation, incorporation of 2′-O-methyl (M), 2′-O-methyl 3′phosphorothioate (MS), or 2′-O-methyl 3′thioPACE (MSP) at one or more terminal nucleotides. Such chemically modified guide RNAs can comprise increased stability and increased activity as compared to unmodified guide RNAs, though on-target vs. off-target specificity is not predictable. (See, Hendel, 2015, Nat Biotechnol. 33(9):985-9, doi: 10.1038/nbt.3290, published online 29 Jun. 2015). Chemically modified guide RNAs further include, without limitation, RNAs with phosphorothioate linkages and locked nucleic acid (LNA) nucleotides comprising a methylene bridge between the 2′ and 4′ carbons of the ribose ring.

[0394] In some embodiments, the degree of complementarity, when optimally aligned using a suitable alignment algorithm, is about or more than about 50%, 60%, 75%, 80%, 85%, 90%, 95%, 97.5%, 99%, or more. Optimal alignment may be determined with the use of any suitable algorithm for aligning sequences, non-limiting example of which include the Smith-Waterman algorithm, the Needleman-Wunsch algorithm, algorithms based on the Burrows-Wheeler Transform (e.g., the Burrows Wheeler Aligner), ClustalW, Clustal X, BLAT, Novoalign (Novocraft Technologies; available at www.novocraft.com), ELAND (Illumina, San Diego, Calif.), SOAP (available at soap.genomics.org.cn), and Maq (available at maq.sourceforge.net). The ability of a guide sequence (within a nucleic acid-targeting guide RNA) to direct sequence-specific binding of a nucleic acid-targeting complex to a target nucleic acid sequence may be assessed by any suitable assay. For example, the components of a nucleic acid-targeting CRISPR system sufficient to form a nucleic acid-targeting complex, including the guide sequence to be tested, may be provided to a host cell having the corresponding target nucleic acid sequence, such as by transfection with vectors encoding the components of the nucleic acid-targeting complex, followed by an assessment of preferential targeting (e.g., cleavage) within the target nucleic acid sequence, such as by Surveyor assay as described herein. Similarly, cleavage of a target nucleic acid sequence may be evaluated in a test tube by providing the target nucleic acid sequence, components of a nucleic acid-targeting complex, including the guide sequence to be tested and a control guide sequence different from the test guide sequence, and comparing binding or rate of cleavage at the target sequence between the test and control guide sequence reactions. Other assays are possible, and will occur to those skilled in the art. A guide sequence, and hence a nucleic acid-targeting guide RNA may be selected to target any target nucleic acid sequence. The target sequence may be DNA. The target sequence may be any RNA sequence. In some embodiments, the target sequence may be a sequence within a RNA molecule selected from the group consisting of messenger RNA (mRNA), pre-mRNA, ribosomal RNA (rRNA), transfer RNA (tRNA), micro-RNA (miRNA), small interfering RNA (siRNA), small nuclear RNA (snRNA), small nucleolar RNA (snoRNA), double stranded RNA (dsRNA), non coding RNA (ncRNA), long non-coding RNA (lncRNA), and small cytoplasmatic RNA (scRNA). In some preferred embodiments, the target sequence may be a sequence within a RNA molecule selected from the group consisting of mRNA, pre-mRNA, and rRNA. In some preferred embodiments, the target sequence may be a sequence within a RNA molecule selected from the group consisting of ncRNA, and lncRNA. In some more preferred embodiments, the target sequence may be a sequence within an mRNA molecule or a pre-mRNA molecule.

[0395] In some embodiments, a nucleic acid-targeting guide RNA is selected to reduce the degree secondary structure within the RNA-targeting guide RNA. In some embodiments, about or less than about 75%, 50%, 40%, 30%, 25%, 20%, 15%, 10%, 5%, 1%, or fewer of the nucleotides of the nucleic acid-targeting guide RNA participate in self-complementary base pairing when optimally folded. Optimal folding may be determined by any suitable polynucleotide folding algorithm. Some programs are based on calculating the minimal Gibbs free energy. An example of one such algorithm is mFold, as described by Zuker and Stiegler (Nucleic Acids Res. 9 (1981), 133-148). Another example folding algorithm is the online webserver RNAfold, developed at Institute for Theoretical Chemistry at the University of Vienna, using the centroid structure prediction algorithm (see e.g., A. R. Gruber et al., 2008, Cell 106(1): 23-24; and P A Carr and G M Church, 2009, Nature Biotechnology 27(12): 1151-62).

[0396] In certain embodiments, a guide RNA or crRNA may comprise, consist essentially of, or consist of a direct repeat (DR) sequence and a guide sequence or spacer sequence. In certain embodiments, the guide RNA or crRNA may comprise, consist essentially of, or consist of a direct repeat sequence fused or linked to a guide sequence or spacer sequence. In certain embodiments, the direct repeat sequence may be located upstream (i.e., 5′) from the guide sequence or spacer sequence. In other embodiments, the direct repeat sequence may be located downstream (i.e., 3′) from the guide sequence or spacer sequence.

[0397] In certain embodiments, the crRNA comprises a stem loop, preferably a single stem loop. In certain embodiments, the direct repeat sequence forms a stem loop, preferably a single stem loop.

[0398] In certain embodiments, the spacer length of the guide RNA is from 15 to 35 nt. In certain embodiments, the spacer length of the guide RNA is at least 15 nucleotides, preferably at least 18 nt, such at at least 19, 20, 21, 22, or more nt. In certain embodiments, the spacer length is from 15 to 17 nt, e.g., 15, 16, or 17 nt, from 17 to 20 nt, e.g., 17, 18, 19, or 20 nt, from 20 to 24 nt, e.g., 20, 21, 22, 23, or 24 nt, from 23 to 25 nt, e.g., 23, 24, or 25 nt, from 24 to 27 nt, e.g., 24, 25, 26, or 27 nt, from 27-30 nt, e.g., 27, 28, 29, or 30 nt, from 30-35 nt, e.g., 30, 31, 32, 33, 34, or 35 nt, or 35 nt or longer.

[0399] For minimization of toxicity and off-target effects, it will be important to control the concentration of RNA-targeting guide RNA delivered. Optimal concentrations of nucleic acid-targeting guide RNA can be determined by testing different concentrations in a cellular or non-human eukaryote animal model and using deep sequencing the analyze the extent of modification at potential off-target genomic loci. The concentration that gives the highest level of on-target modification while minimizing the level of off-target modification should be chosen for in vivo delivery. The RNA-targeting system is derived advantageously from a CRISPR-Cas13b system. In some embodiments, one or more elements of a RNA-targeting system is derived from a particular organism comprising an endogenous RNA-targeting system of a Cas13b effector protein system as herein-discussed.

[0400] The terms “orthologue” (also referred to as “ortholog” herein) and “homologue” (also referred to as “homolog” herein) are well known in the art. By means of further guidance, a “homologue” of a protein as used herein is a protein of the same species which performs the same or a similar function as the protein it is a homologue of Homologous proteins may but need not be structurally related, or are only partially structurally related. An “orthologue” of a protein as used herein is a protein of a different species which performs the same or a similar function as the protein it is an orthologue of Orthologous proteins may but need not be structurally related, or are only partially structurally related. In particular embodiments, the homologue or orthologue of a Cas13b protein as referred to herein has a sequence homology or identity of at least 50%, at least 60%, at least 70%, at least 80%, more preferably at least 85%, even more preferably at least 90%, such as for instance at least 95% with a Cas13b effector protein set forth in FIG. 1.

[0401] It will be appreciated that any of the functionalities described herein may be engineered into CRISPR enzymes from other orthologs, including chimeric enzymes comprising fragments from multiple orthologs. Examples of such orthologs are described elsewhere herein. Thus, chimeric enzymes may comprise fragments of CRISPR enzyme orthologs of an organism which includes but is not limited to Bergeyella, Prevotella, Porphyromonas, Bacteroides, Alistipes, Riemerella, Myroides, Flavobacterium, Capnocytophaga, Chryseobacterium, Phaeodactylibacter, Paludibacter or Psychroflexus. A chimeric enzyme can comprise a first fragment and a second fragment, and the fragments, wherein one of the first and second fragment is of or from a Cas13b effector protein of a first species (for example, a Cas13b effector protein as listed in FIG. 1) and the other fragment is of or from a CRISPR enzyme ortholog of a different species.

[0402] In an embodiment of the invention, there is provided an effector protein which comprises an amino acid sequence which is at least 50%, 60%, 70%, 80%, 85%, 90%, 91%, 92%, 93%, 94%, 95%, 96%, 97%, 98%, 99% or more homologous or identical to a wild type Cas13b effector protein selected from the group consisting of Porphyromonas gulae Cas13b (accession number WP_039434803), Prevotella sp. P5-125 Cas13b (accession number WP_044065294), Porphyromonas gingivalis Cas13b (accession number WP_053444417), Porphyromonas sp. COT-052 OH4946 Cas13b (accession number WP_039428968), Bacteroides pyogenes Cas13b (accession number WP_034542281), Riemerella anatipestifer Cas13b (accession number WP_004919755). The most preferred effector proteins are those at least 50%, 60%, 70%, 80%, 85%, 90%, 91%, 92%, 93%, 94%, 95%, 96%, 97%, 98%, 99% or more homologous or identical to a wild type Cas13b effector protein selected from the group consisting of Porphyromonas gulae Cas13b (accession number WP_039434803), Prevotella sp. P5-125 Cas13b (accession number WP_044065294), Porphyromonas gingivalis Cas13b (accession number WP_053444417), Porphyromonas sp. COT-052 OH4946 Cas13b (accession number WP_039428968); and most specifically preferred are Porphyromonas gulae Cas13b (accession number WP_039434803) or Prevotella sp. P5-125 Cas13b (accession number WP_044065294).

[0403] It has been found that a number of Cas13b orthologs are characterized by common motifs. Accordingly, in particular embodiments, the Cas13b effector protein is a protein comprising a sequence having at least 70% sequence identity with one or more of the sequences consisting of DKHXFGAFLNLARHN (SEQ ID NO: 118), GLLFFVSLFLDK (SEQ ID NO: 119), SKIXGFK (SEQ ID NO: 120), DMLNELXRCP (SEQ ID NO: 121), RXZDRFPYFALRYXD (SEQ ID NO: 122) and LRFQVBLGXY (SEQ ID NO: 123). In further particular embodiments, the Cas13b effector protein comprises a sequence having at least 70% seqeuence identity at least 2, 3, 4, 5 or all 6 of these sequences. In further particular embodiments, the sequence identity with these sequences is at least 75%, 80%, 85%, 90%, 95% or 100%. In further particular embodiments, the Cas13b effector protein is a protein comprising a sequence having 100% sequence identity with GLLFFVSLFL (SEQ ID NO: 124) and RHQXRFPYF (SEQ ID NO: 125). In further particular embodiments, the Cas13b effector is a Cas13b effector protein comprising a sequence having 100% sequence identity with RHQDRFPY (SEQ ID NO: 126).

[0404] In an embodiment of the invention, the effector protein comprises an amino acid sequence having at least 80% 85%, 90%, 91%, 92%, 93%, 94%, 95%, 96%, 97%, 98%, 99% or more sequence homology or identity to a Type VI-B effector protein consensus sequence including but not limited to a consensus sequence described herein.

[0405] In an embodiment of the invention, the effector protein comprises at least one HEPN domain, including but not limited to HEPN domains described herein, HEPN domains known in the art, and domains recognized to be HEPN domains by comparison to consensus sequences and motifs. In one non-limiting example, a consensus sequence can be derived from the sequences of Cas13b orthologs provided herein.

[0406] In an embodiment of the invention, the effector protein comprises one or more HEPN domains comprising a RxxxxH motif sequence. The RxxxxH motif sequence can be, without limitation, from an HEPN domain described herein or an HEPN domain known in the art. RxxxxH motifs sequences further include motif sequences created by combining portions of two or more HEPN domains.

[0407] In some embodiments, the effector protein comprises two HEPN domains. In some embodiments, the effector protein comprises at least one catalytically active HEPN domain comprising an RxxxxH motif. In some embodiments, the effector protein comprises two catalytically active HEPN domains each comprising an RxxxxH motif. In some embodiments, the effector protein comprises at least one catalytically inactive HEPN domain obtained from mutating at least one of R or H of a wild-type RxxxxH motif. In some embodiments, the effector protein comprises two catalytically inactive HEPN domains each obtained from mutating at least one of R or H of a wild-type RxxxxH motif.

[0408] In an embodiment, nucleic acid molecule(s) encoding the Type VI-B RNA-targeting effector protein may be codon-optimized for expression in an eukaryotic cell. A eukaryote can be as herein discussed. Nucleic acid molecule(s) can be engineered or non-naturally occurring.

[0409] In an embodiment, the Type VI-B RNA-targeting effector protein, in particular Cas13b or an ortholog or homolog thereof, may comprise one or more mutations (and hence nucleic acid molecule(s) coding for same may have mutation(s)). The mutations may be artificially introduced mutations and may include but are not limited to one or more mutations in a catalytic domain. Examples of catalytic domains with reference to a Cas9 enzyme may include but are not limited to RuvC I, RuvC II, RuvC III and HNH domains. Examples of catalytic domains with reference to a Cas13b enzyme may include but are not limited to HEPN domains.

[0410] In an embodiment, the Type VI-B protein such as Cas13b or an ortholog or homolog thereof, may comprise one or more mutations. The mutations may be artificially introduced mutations and may include but are not limited to one or more mutations in a catalytic domain. Examples of catalytic domains with reference to a Cas enzyme may include but are not limited to HEPN domains.

[0411] In an embodiment, the Type VI-B protein such as Cas13b or an ortholog or homolog thereof, may be used as a generic nucleic acid binding protein with fusion to or being operably linked to a functional domain. Exemplary functional domains may include but are not limited to translational initiator, translational activator, translational repressor, nucleases, in particular ribonucleases, a spliceosome, beads, a light inducible/controllable domain or a chemically inducible/controllable domain.

[0412] In some embodiments, the unmodified nucleic acid-targeting effector protein may have cleavage activity. In some embodiments, the RNA-targeting effector protein may direct cleavage of one or both nucleic acid (DNA or RNA) strands at the location of or near a target sequence, such as within the target sequence and/or within the complement of the target sequence or at sequences associated with the target sequence. In some embodiments, the nucleic acid-targeting Cas protein may direct cleavage of one or both DNA or RNA strands within about 1, 2, 3, 4, 5, 6, 7, 8, 9, 10, 15, 20, 25, 50, 100, 200, 500, or more base pairs from the first or last nucleotide of a target sequence. In some embodiments, a vector encodes a nucleic acid-targeting Cas protein that may be mutated with respect to a corresponding wild-type enzyme such that the mutated nucleic acid-targeting Cas protein lacks the ability to cleave RNA strands of a target polynucleotide containing a target sequence. As a further example, two or more catalytic domains of Cas (e.g. HEPN domain) may be mutated to produce a mutated Cas substantially lacking all RNA cleavage activity. In some embodiments, a nucleic acid-targeting effector protein may be considered to substantially lack all RNA cleavage activity when the RNA cleavage activity of the mutated enzyme is about no more than 25%, 10%, 5%, 1%, 0.1%, 0.01%, or less of the nucleic acid cleavage activity of the non-mutated form of the enzyme; an example can be when the nucleic acid cleavage activity of the mutated form is nil or negligible as compared with the non-mutated form. An effector protein may be identified with reference to the general class of enzymes that share homology to the biggest nuclease with multiple nuclease domains from the Type VI-B CRISPR system. By derived, Applicants mean that the derived enzyme is largely based on, in the sense of having a high degree of sequence homology with, a wildtype enzyme, but that it has been mutated (modified) in some way as known in the art or as described herein.

[0413] Again, it will be appreciated that the terms Cas and CRISPR enzyme and CRISPR protein and Cas protein are generally used interchangeably and at all points of reference herein refer by analogy to novel CRISPR effector proteins further described in this application, unless otherwise apparent, such as by specific reference to Cas9. As mentioned above, many of the residue numberings used herein refer to the effector protein from the Type VI CRISPR locus. However, it will be appreciated that this invention includes many more effector proteins from other species of microbes. In certain embodiments, Cas may be constitutively present or inducibly present or conditionally present or administered or delivered. Cas optimization may be used to enhance function or to develop new functions, one can generate chimeric Cas proteins. And Cas may be used as a generic nucleic acid binding protein.

[0414] In some embodiments, one or more vectors driving expression of one or more elements of a nucleic acid-targeting system are introduced into a host cell such that expression of the elements of the nucleic acid-targeting system direct formation of a nucleic acid-targeting complex at one or more target sites. For example, a nucleic acid-targeting effector enzyme and a nucleic acid-targeting guide RNA could each be operably linked to separate regulatory elements on separate vectors. RNA(s) of the nucleic acid-targeting system can be delivered to a transgenic nucleic acid-targeting effector protein animal or mammal, e.g., an animal or mammal that constitutively or inducibly or conditionally expresses nucleic acid-targeting effector protein; or an animal or mammal that is otherwise expressing nucleic acid-targeting effector proteinor has cells containing nucleic acid-targeting effector protein, such as by way of prior administration thereto of a vector or vectors that code for and express in vivo nucleic acid-targeting effector protein. Alternatively, two or more of the elements expressed from the same or different regulatory elements, may be combined in a single vector, with one or more additional vectors providing any components of the nucleic acid-targeting system not included in the first vector. nucleic acid-targeting system elements that are combined in a single vector may be arranged in any suitable orientation, such as one element located 5′ with respect to (“upstream” of) or 3′ with respect to (“downstream” of) a second element. The coding sequence of one element may be located on the same or opposite strand of the coding sequence of a second element, and oriented in the same or opposite direction. In some embodiments, a single promoter drives expression of a transcript encoding a nucleic acid-targeting effector protein and the nucleic acid-targeting guide RNA, embedded within one or more intron sequences (e.g., each in a different intron, two or more in at least one intron, or all in a single intron). In some embodiments, the nucleic acid-targeting effector protein and the nucleic acid-targeting guide RNA may be operably linked to and expressed from the same promoter. Delivery vehicles, vectors, particles, nanoparticles, formulations and components thereof for expression of one or more elements of a nucleic acid-targeting system are as used in the foregoing documents, such as WO 2014/093622 (PCT/US2013/074667). In some embodiments, a vector comprises one or more insertion sites, such as a restriction endonuclease recognition sequence (also referred to as a “cloning site”). In some embodiments, one or more insertion sites (e.g., about or more than about 1, 2, 3, 4, 5, 6, 7, 8, 9, 10, or more insertion sites) are located upstream and/or downstream of one or more sequence elements of one or more vectors. In some embodiments, a vector comprises two or more insertion sites, so as to allow insertion of a guide sequence at each site. In such an arrangement, the two or more guide sequences may comprise two or more copies of a single guide sequence, two or more different guide sequences, or combinations of these. When multiple different guide sequences are used, a single expression construct may be used to target nucleic acid-targeting activity to multiple different, corresponding target sequences within a cell. For example, a single vector may comprise about or more than about 1, 2, 3, 4, 5, 6, 7, 8, 9, 10, 15, 20, or more guide sequences. In some embodiments, about or more than about 1, 2, 3, 4, 5, 6, 7, 8, 9, 10, or more such guide-sequence-containing vectors may be provided, and optionally delivered to a cell. In some embodiments, a vector comprises a regulatory element operably linked to an enzyme-coding sequence encoding a a nucleic acid-targeting effector protein. nucleic acid-targeting effector protein or nucleic acid-targeting guide RNA or RNA(s) can be delivered separately; and advantageously at least one of these is delivered via a particle or nanoparticle complex. nucleic acid-targeting effector protein mRNA can be delivered prior to the nucleic acid-targeting guide RNA to give time for nucleic acid-targeting effector protein to be expressed. nucleic acid-targeting effector protein mRNA might be administered 1-12 hours (preferably around 2-6 hours) prior to the administration of nucleic acid-targeting guide RNA. Alternatively, nucleic acid-targeting effector protein mRNA and nucleic acid-targeting guide RNA can be administered together. Advantageously, a second booster dose of guide RNA can be administered 1-12 hours (preferably around 2-6 hours) after the initial administration of nucleic acid-targeting effector protein mRNA+guide RNA. Additional administrations of nucleic acid-targeting effector protein mRNA and/or guide RNA might be useful to achieve the most efficient levels of genome and/or transcriptome modification.

[0415] In one aspect, the invention provides methods for using one or more elements of a nucleic acid-targeting system. The nucleic acid-targeting complex of the invention provides an effective means for modifying a target RNA. The nucleic acid-targeting complex of the invention has a wide variety of utility including modifying (e.g., deleting, inserting, translocating, inactivating, activating) a target RNA in a multiplicity of cell types. As such the nucleic acid-targeting complex of the invention has a broad spectrum of applications in, e.g., gene therapy, drug screening, disease diagnosis, and prognosis. An exemplary nucleic acid-targeting complex comprises a RNA-targeting effector protein complexed with a guide RNA hybridized to a target sequence within the target locus of interest.

[0416] In one embodiment, this invention provides a method of cleaving a target RNA. The method may comprise modifying a target RNA using a nucleic acid-targeting complex that binds to the target RNA and effect cleavage of said target RNA. In an embodiment, the nucleic acid-targeting complex of the invention, when introduced into a cell, may create a break (e.g., a single or a double strand break) in the RNA sequence. For example, the method can be used to cleave a disease RNA in a cell. For example, an exogenous RNA template comprising a sequence to be integrated flanked by an upstream sequence and a downstream sequence may be introduced into a cell. The upstream and downstream sequences share sequence similarity with either side of the site of integration in the RNA. Where desired, a donor RNA can be mRNA. The exogenous RNA template comprises a sequence to be integrated (e.g., a mutated RNA). The sequence for integration may be a sequence endogenous or exogenous to the cell. Examples of a sequence to be integrated include RNA encoding a protein or a non-coding RNA (e.g., a microRNA). Thus, the sequence for integration may be operably linked to an appropriate control sequence or sequences. Alternatively, the sequence to be integrated may provide a regulatory function. The upstream and downstream sequences in the exogenous RNA template are selected to promote recombination between the RNA sequence of interest and the donor RNA. The upstream sequence is a RNA sequence that shares sequence similarity with the RNA sequence upstream of the targeted site for integration. Similarly, the downstream sequence is a RNA sequence that shares sequence similarity with the RNA sequence downstream of the targeted site of integration. The upstream and downstream sequences in the exogenous RNA template can have 75%, 80%, 85%, 90%, 95%, or 100% sequence identity with the targeted RNA sequence. Preferably, the upstream and downstream sequences in the exogenous RNA template have about 95%, 96%, 97%, 98%, 99%, or 100% sequence identity with the targeted RNA sequence. In some methods, the upstream and downstream sequences in the exogenous RNA template have about 99% or 100% sequence identity with the targeted RNA sequence. An upstream or downstream sequence may comprise from about 20 bp to about 2500 bp, for example, about 50, 100, 200, 300, 400, 500, 600, 700, 800, 900, 1000, 1100, 1200, 1300, 1400, 1500, 1600, 1700, 1800, 1900, 2000, 2100, 2200, 2300, 2400, or 2500 bp. In some methods, the exemplary upstream or downstream sequence have about 200 bp to about 2000 bp, about 600 bp to about 1000 bp, or more particularly about 700 bp to about 1000 bp. In some methods, the exogenous RNA template may further comprise a marker. Such a marker may make it easy to screen for targeted integrations. Examples of suitable markers include restriction sites, fluorescent proteins, or selectable markers. The exogenous RNA template of the invention can be constructed using recombinant techniques (see, for example, Sambrook et al., 2001 and Ausubel et al., 1996). In a method for modifying a target RNA by integrating an exogenous RNA template, a break (e.g., double or single stranded break in double or single stranded DNA or RNA) is introduced into the DNA or RNA sequence by the nucleic acid-targeting complex, the break is repaired via homologous recombination with an exogenous RNA template such that the template is integrated into the RNA target. The presence of a double-stranded break facilitates integration of the template. In other embodiments, this invention provides a method of modifying expression of a RNA in a eukaryotic cell. The method comprises increasing or decreasing expression of a target polynucleotide by using a nucleic acid-targeting complex that binds to the RNA (e.g., mRNA or pre-mRNA). In some methods, a target RNA can be inactivated to effect the modification of the expression in a cell. For example, upon the binding of a RNA-targeting complex to a target sequence in a cell, the target RNA is inactivated such that the sequence is not translated, the coded protein is not produced, or the sequence does not function as the wild-type sequence does. For example, a protein or microRNA coding sequence may be inactivated such that the protein or microRNA or pre-microRNA transcript is not produced. The target RNA of a RNA-targeting complex can be any RNA endogenous or exogenous to the eukaryotic cell. For example, the target RNA can be a RNA residing in the nucleus of the eukaryotic cell. The target RNA can be a sequence (e.g., mRNA or pre-mRNA) coding a gene product (e.g., a protein) or a non-coding sequence (e.g., ncRNA, lncRNA, tRNA, or rRNA). Examples of target RNA include a sequence associated with a signaling biochemical pathway, e.g., a signaling biochemical pathway-associated RNA. Examples of target RNA include a disease associated RNA. A “disease-associated” RNA refers to any RNA which is yielding translation products at an abnormal level or in an abnormal form in cells derived from a disease-affected tissues compared with tissues or cells of a non disease control. It may be a RNA transcribed from a gene that becomes expressed at an abnormally high level; it may be a RNA transcribed from a gene that becomes expressed at an abnormally low level, where the altered expression correlates with the occurrence and/or progression of the disease. A disease-associated RNA also refers to a RNA transcribed from a gene possessing mutation(s) or genetic variation that is directly responsible or is in linkage disequilibrium with a gene(s) that is responsible for the etiology of a disease. The translated products may be known or unknown, and may be at a normal or abnormal level. The target RNA of a RNA-targeting complex can be any RNA endogenous or exogenous to the eukaryotic cell. For example, the target RNA can be a RNA residing in the nucleus of the eukaryotic cell. The target RNA can be a sequence (e.g., mRNA or pre-mRNA) coding a gene product (e.g., a protein) or a non-coding sequence (e.g., ncRNA, lncRNA, tRNA, or rRNA).

[0417] In some embodiments, the method may comprise allowing a nucleic acid-targeting complex to bind to the target RNA to effect cleavage of said target RNA or RNA thereby modifying the target RNA, wherein the nucleic acid-targeting complex comprises a nucleic acid-targeting effector protein complexed with a guide RNA hybridized to a target sequence within said target RNA. In one aspect, the invention provides a method of modifying expression of RNA in a eukaryotic cell. In some embodiments, the method comprises allowing a nucleic acid-targeting complex to bind to the RNA such that said binding results in increased or decreased expression of said RNA; wherein the nucleic acid-targeting complex comprises a nucleic acid-targeting effector protein complexed with a guide RNA. Similar considerations and conditions apply as above for methods of modifying a target RNA. In fact, these sampling, culturing and re-introduction options apply across the aspects of the present invention. In one aspect, the invention provides for methods of modifying a target RNA in a eukaryotic cell, which may be in vivo, ex vivo or in vitro. In some embodiments, the method comprises sampling a cell or population of cells from a human or non-human animal, and modifying the cell or cells. Culturing may occur at any stage ex vivo. The cell or cells may even be re-introduced into the non-human animal or plant. For re-introduced cells it is particularly preferred that the cells are stem cells.

[0418] Indeed, in any aspect of the invention, the nucleic acid-targeting complex may comprise a nucleic acid-targeting effector protein complexed with a guide RNA hybridized to a target sequence.

[0419] The invention relates to the engineering and optimization of systems, methods and compositions used for the control of gene expression involving RNA sequence targeting, that relate to the nucleic acid-targeting system and components thereof. In advantageous embodiments, the effector protein is a Type VI-B protein such as Cas13b. An advantage of the present methods is that the CRISPR system minimizes or avoids off-target binding and its resulting side effects. This is achieved using systems arranged to have a high degree of sequence specificity for the target RNA.

[0420] The use of two different aptamers (each associated with a distinct nucleic acid-targeting guide RNAs) allows an activator-adaptor protein fusion and a repressor-adaptor protein fusion to be used, with different nucleic acid-targeting guide RNAs, to activate expression of one DNA or RNA, whilst repressing another. They, along with their different guide RNAs can be administered together, or substantially together, in a multiplexed approach. A large number of such modified nucleic acid-targeting guide RNAs can be used all at the same time, for example 10 or 20 or 30 and so forth, whilst only one (or at least a minimal number) of effector protein molecules need to be delivered, as a comparatively small number of effector protein molecules can be used with a large number modified guides. The adaptor protein may be associated (preferably linked or fused to) one or more activators or one or more repressors. For example, the adaptor protein may be associated with a first activator and a second activator. The first and second activators may be the same, but they are preferably different activators. Three or more or even four or more activators (or repressors) may be used, but package size may limit the number being higher than 5 different functional domains. Linkers are preferably used, over a direct fusion to the adaptor protein, where two or more functional domains are associated with the adaptor protein. Suitable linkers might include the GlySer linker.

[0421] It is also envisaged that the nucleic acid-targeting effector protein-guide RNA complex as a whole may be associated with two or more functional domains. For example, there may be two or more functional domains associated with the nucleic acid-targeting effector protein, or there may be two or more functional domains associated with the guide RNA (via one or more adaptor proteins), or there may be one or more functional domains associated with the nucleic acid-targeting effector protein and one or more functional domains associated with the guide RNA (via one or more adaptor proteins).

[0422] The fusion between the adaptor protein and the activator or repressor may include a linker. For example, GlySer linkers GGGS (SEQ ID NO: 127) can be used. They can be used in repeats of 3 ((GGGGS)₃) (SEQ ID NO: 128) or 6 (SEQ ID NO: 129), 9 (SEQ ID NO: 130) or even 12 (SEQ ID NO: 131) or more, to provide suitable lengths, as required. Linkers can be used between the guide RNAs and the functional domain (activator or repressor), or between the nucleic acid-targeting effector protein and the functional domain (activator or repressor). The linkers the user to engineer appropriate amounts of “mechanical flexibility”.

[0423] The invention comprehends a nucleic acid-targeting complex comprising a nucleic acid-targeting effector protein and a guide RNA, wherein the nucleic acid-targeting effector protein comprises at least one mutation, such that the nucleic acid-targeting Cas protein has no more than 5% of the activity of the nucleic acid-targeting Cas protein not having the at least one mutation and, optionally, at least one or more nuclear localization sequences; the guide RNA comprises a guide sequence capable of hybridizing to a target sequence in a RNA of interest in a cell; and wherein: the nucleic acid-targeting effector protein is associated with two or more functional domains; or at least one loop of the guide RNA is modified by the insertion of distinct RNA sequence(s) that bind to one or more adaptor proteins, and wherein the adaptor protein is associated with two or more functional domains; or the nucleic acid-targeting effector protein is associated with one or more functional domains and at least one loop of the guide RNA is modified by the insertion of distinct RNA sequence(s) that bind to one or more adaptor proteins, and wherein the adaptor protein is associated with one or more functional domains.

### Cas13b Effector Protein Complexes can Deliver Functional Effectors

[0424] Unlike CRISPR-Cas13b-mediated knockout, which eliminates expression by mutating at the RNA level, CRISPR-Cas13b knockdown allows for temporary reduction of gene expression through the use of artificial transcription factors, e.g., via mutating residues in cleavage domain(s) of the Cas13b protein results in the generation of a catalytically inactive Cas13b protein. A catalytically inactive Cas13b complexes with a guide RNA or crRNA and localizes to the RNA sequence specified by that guide RNA's or crRNA's targeting domain, however, it does not cleave the target. Fusion of the inactive Cas13b protein to an effector domain, e.g., a transcription repression domain, enables recruitment of the effector to any site specified by the guide RNA.

### Optimized Functional RNA Targeting Systems

[0425] In an aspect the invention thus provides a system for specific delivery of functional components to the RNA environment. This can be ensured using the CRISPR systems comprising the RNA targeting effector proteins of the present invention which allow specific targeting of different components to RNA. More particularly such components include activators or repressors, such as activators or repressors of RNA translation, degradation, etc.

[0426] According to one aspect the invention provides non-naturally occurring or engineered composition comprising a guide RNA or crRNA comprising a guide sequence capable of hybridizing to a target sequence of interest in a cell, wherein the guide RNA or crRNA is modified by the insertion of one or more distinct RNA sequence(s) that bind an adaptor protein. In particular embodiments, the RNA sequences may bind to two or more adaptor proteins (e.g. aptamers), and wherein each adaptor protein is associated with one or more functional domains. When there is more than one functional domain, the functional domains can be same or different, e.g., two of the same or two different activators or repressors. In an aspect the invention provides a herein-discussed composition, wherein the one or more functional domains are attached to the RNA targeting enzyme so that upon binding to the target RNA the functional domain is in a spatial orientation allowing for the functional domain to function in its attributed function; In an aspect the invention provides a herein-discussed composition, wherein the composition comprises a CRISPR-Cas13b complex having at least three functional domains, at least one of which is associated with the RNA targeting enzyme and at least two of which are associated with the gRNA or crRNA.

### Delivery of the Cas13b Effector Protein Complex or Components Thereof

[0427] Through this disclosure and the knowledge in the art, TALEs, CRISPR-Cas systems, or components thereof or nucleic acid molecules thereof (including, for instance HDR template) or nucleic acid molecules encoding or providing components thereof may be delivered by a delivery system herein described both generally and in detail.

[0428] Vector delivery, e.g., plasmid, viral delivery: The CRISPR enzyme, and/or any of the present RNAs, for instance a guide RNA, can be delivered using any suitable vector, e.g., plasmid or viral vectors, such as adeno associated virus (AAV), lentivirus, adenovirus or other viral vector types, or combinations thereof. Effector proteins and one or more guide RNAs can be packaged into one or more vectors, e.g., plasmid or viral vectors. In some embodiments, the vector, e.g., plasmid or viral vector is delivered to the tissue of interest by, for example, an intramuscular injection, while other times the delivery is via intravenous, transdermal, intranasal, oral, mucosal, or other delivery methods. Such delivery may be either via a single dose, or multiple doses. One skilled in the art understands that the actual dosage to be delivered herein may vary greatly depending upon a variety of factors, such as the vector choice, the target cell, organism, or tissue, the general condition of the subject to be treated, the degree of transformation/modification sought, the administration route, the administration mode, the type of transformation/modification sought, etc.

[0429] Such a dosage may further contain, for example, a carrier (water, saline, ethanol, glycerol, lactose, sucrose, calcium phosphate, gelatin, dextran, agar, pectin, peanut oil, sesame oil, etc.), a diluent, a pharmaceutically-acceptable carrier (e.g., phosphate-buffered saline), a pharmaceutically-acceptable excipient, and/or other compounds known in the art. The dosage may further contain one or more pharmaceutically acceptable salts such as, for example, a mineral acid salt such as a hydrochloride, a hydrobromide, a phosphate, a sulfate, etc.; and the salts of organic acids such as acetates, propionates, malonates, benzoates, etc. Additionally, auxiliary substances, such as wetting or emulsifying agents, pH buffering substances, gels or gelling materials, flavorings, colorants, microspheres, polymers, suspension agents, etc. may also be present herein. In addition, one or more other conventional pharmaceutical ingredients, such as preservatives, humectants, suspending agents, surfactants, antioxidants, anticaking agents, fillers, chelating agents, coating agents, chemical stabilizers, etc. may also be present, especially if the dosage form is a reconstitutable form. Suitable exemplary ingredients include microcrystalline cellulose, carboxymethylcellulose sodium, polysorbate 80, phenylethyl alcohol, chlorobutanol, potassium sorbate, sorbic acid, sulfur dioxide, propyl gallate, the parabens, ethyl vanillin, glycerin, phenol, parachlorophenol, gelatin, albumin and a combination thereof. A thorough discussion of pharmaceutically acceptable excipients is available in REMINGTON'S PHARMACEUTICAL SCIENCES (Mack Pub. Co., N.J. 1991) which is incorporated by reference herein.

[0430] In an embodiment herein the delivery is via an adenovirus, which may be at a single booster dose containing at least 1×10⁵ particles (also referred to as particle units, pu) of adenoviral vector. In an embodiment herein, the dose preferably is at least about 1×10⁶ particles (for example, about 1×10⁶-1×10¹² particles), more preferably at least about 1×10′ particles, more preferably at least about 1×10⁸ particles (e.g., about 1×10⁸-1×10¹¹ particles or about 1×10⁸-1×10¹² particles), and most preferably at least about 1×10° particles (e.g., about 1×10⁹-1×10¹⁰ particles or about 1×10⁹-1×10¹² particles), or even at least about 1×10¹⁰ particles (e.g., about 1×10¹⁰-1×10¹² particles) of the adenoviral vector. Alternatively, the dose comprises no more than about 1×10¹⁴ particles, preferably no more than about 1×10¹³ particles, even more preferably no more than about 1×10¹² particles, even more preferably no more than about 1×10¹¹ particles, and most preferably no more than about 1×10¹⁰ particles (e.g., no more than about 1×10⁹ articles). Thus, the dose may contain a single dose of adenoviral vector with, for example, about 1×10⁶ particle units (pu), about 2×10⁶ pu, about 4×10⁶ pu, about 1×10′ pu, about 2×10′ pu, about 4×10′ pu, about 1×10⁸ pu, about 2×10⁸ pu, about 4×10⁸ pu, about 1×10⁹ pu, about 2×10⁹ pu, about 4×10⁹ pu, about 1×10¹⁰ pu, about 2×10¹⁰ pu, about 4×10¹⁰ pu, about 1×10¹¹ pu, about 2×10¹¹ pu, about 4×10¹¹ pu, about 1×10¹² pu, about 2×10¹² pu, or about 4×10¹² pu of adenoviral vector. See, for example, the adenoviral vectors in U.S. Pat. No. 8,454,972 B2 to Nabel, et. al., granted on Jun. 4, 2013; incorporated by reference herein, and the dosages at col 29, lines 36-58 thereof. In an embodiment herein, the adenovirus is delivered via multiple doses.

[0431] In an embodiment herein, the delivery is via an AAV. A therapeutically effective dosage for in vivo delivery of the AAV to a human is believed to be in the range of from about 20 to about 50 ml of saline solution containing from about 1×10¹⁰ to about 1×10¹⁰ functional AAV/ml solution. The dosage may be adjusted to balance the therapeutic benefit against any side effects. In an embodiment herein, the AAV dose is generally in the range of concentrations of from about 1×10⁵ to 1×10⁵⁰ genomes AAV, from about 1×10⁸ to 1×10²⁰ genomes AAV, from about 1×10¹⁰ to about 1×10¹⁶ genomes, or about 1×10¹¹ to about 1×10¹⁶ genomes AAV. A human dosage may be about 1×10¹³ genomes AAV. Such concentrations may be delivered in from about 0.001 ml to about 100 ml, about 0.05 to about 50 ml, or about 10 to about 25 ml of a carrier solution. Other effective dosages can be readily established by one of ordinary skill in the art through routine trials establishing dose response curves. See, for example, U.S. Pat. No. 8,404,658 B2 to Hajjar, et al., granted on Mar. 26, 2013, at col. 27, lines 45-60.

[0432] In an embodiment herein the delivery is via a plasmid. In such plasmid compositions, the dosage should be a sufficient amount of plasmid to elicit a response. For instance, suitable quantities of plasmid DNA in plasmid compositions can be from about 0.1 to about 2 mg, or from about 1 μg to about 10 μg per 70 kg individual. Plasmids of the invention will generally comprise (i) a promoter; (ii) a sequence encoding an nucleic acid-targeting CRISPR enzyme, operably linked to said promoter; (iii) a selectable marker; (iv) an origin of replication; and (v) a transcription terminator downstream of and operably linked to (ii). The plasmid can also encode the RNA components of a CRISPR complex, but one or more of these may instead be encoded on a different vector.

[0433] The doses herein are based on an average 70 kg individual. The frequency of administration is within the ambit of the medical or veterinary practitioner (e.g., physician, veterinarian), or scientist skilled in the art. It is also noted that mice used in experiments are typically about 20 g and from mice experiments one can scale up to a 70 kg individual.

[0434] In some embodiments the RNA molecules of the invention are delivered in liposome or lipofectin formulations and the like and can be prepared by methods well known to those skilled in the art. Such methods are described, for example, in U.S. Pat. Nos. 5,593,972, 5,589,466, and 5,580,859, which are herein incorporated by reference. Delivery systems aimed specifically at the enhanced and improved delivery of siRNA into mammalian cells have been developed, (see, for example, Shen et al FEBS Let. 2003, 539:111-114; Xia et al., Nat. Biotech. 2002, 20:1006-1010; Reich et al., Mol. Vision. 2003, 9: 210-216; Sorensen et al., J. Mol. Biol. 2003, 327: 761-766; Lewis et al., Nat. Gen. 2002, 32: 107-108 and Simeoni et al., NAR 2003, 31, 11: 2717-2724) and may be applied to the present invention. siRNA has recently been successfully used for inhibition of gene expression in primates (see for example. Tolentino et al., Retina 24(4):660 which may also be applied to the present invention.

[0435] Indeed, RNA delivery is a useful method of in vivo delivery. It is possible to deliver nucleic acid-targeting Cas protein and guide RNA (and, for instance, HR repair template) into cells using liposomes or particles. Thus delivery of the nucleic acid-targeting Cas13b protein and/or delivery of the guide RNAs or crRNAs of the invention may be in RNA form and via microvesicles, liposomes or particles. For example, Cas13b mRNA and guide RNA or crRNA can be packaged into liposomal particles for delivery in vivo. Liposomal transfection reagents such as lipofectamine from Life Technologies and other reagents on the market can effectively deliver RNA molecules into the liver.

[0436] Means of delivery of RNA also preferred include delivery of RNA via nanoparticles (Cho, S., Goldberg, M., Son, S., Xu, Q., Yang, F., Mei, Y., Bogatyrev, S., Langer, R. and Anderson, D., Lipid-like nanoparticles for small interfering RNA delivery to endothelial cells, Advanced Functional Materials, 19: 3112-3118, 2010) or exosomes (Schroeder, A., Levins, C., Cortez, C., Langer, R., and Anderson, D., Lipid-based nanotherapeutics for siRNA delivery, Journal of Internal Medicine, 267: 9-21, 2010, PMID: 20059641). Indeed, exosomes have been shown to be particularly useful in delivery siRNA, a system with some parallels to the RNA-targeting system. For instance, El-Andaloussi S, et al. (“Exosome-mediated delivery of siRNA in vitro and in vivo.” Nat Protoc. 2012 December; 7(12):2112-26. doi: 10.1038/nprot.2012.131. Epub 2012 Nov. 15) describe how exosomes are promising tools for drug delivery across different biological barriers and can be harnessed for delivery of siRNA in vitro and in vivo. Their approach is to generate targeted exosomes through transfection of an expression vector, comprising an exosomal protein fused with a peptide ligand. The exosomes are then purify and characterized from transfected cell supernatant, then RNA is loaded into the exosomes. Delivery or administration according to the invention can be performed with exosomes, in particular but not limited to the brain. Vitamin E (α-tocopherol) may be conjugated with nucleic acid-targeting Cas protein and delivered to the brain along with high density lipoprotein (HDL), for example in a similar manner as was done by Uno et al. (HUMAN GENE THERAPY 22:711-719 (June 2011)) for delivering short-interfering RNA (siRNA) to the brain. Mice were infused via Osmotic minipumps (model 1007D; Alzet, Cupertino, Calif.) filled with phosphate-buffered saline (PBS) or free TocsiBACE or Toc-siBACE/HDL and connected with Brain Infusion Kit 3 (Alzet). A brain-infusion cannula was placed about 0.5 mm posterior to the bregma at midline for infusion into the dorsal third ventricle. Uno et al. found that as little as 3 nmol of Toc-siRNA with HDL could induce a target reduction in comparable degree by the same ICV infusion method. A similar dosage of nucleic acid-targeting effector protein conjugated to α-tocopherol and co-administered with HDL targeted to the brain may be contemplated for humans in the present invention, for example, about 3 nmol to about 3 μmol of nucleic acid-targeting effector protein targeted to the brain may be contemplated. Zou et al. ((HUMAN GENE THERAPY 22:465-475 (April 2011)) describes a method of lentiviral-mediated delivery of short-hairpin RNAs targeting PKCy for in vivo gene silencing in the spinal cord of rats. Zou et al. administered about 10₁1.1 of a recombinant lentivirus having a titer of 1×10⁹ transducing units (TU)/ml by an intrathecal catheter. A similar dosage of nucleic acid-targeting effector protein expressed in a lentiviral vector targeted to the brain may be contemplated for humans in the present invention, for example, about 10-50 ml of nucleic acid-targeting effector protein targeted to the brain in a lentivirus having a titer of 1×10⁹ transducing units (TU)/ml may be contemplated.

[0437] In terms of local delivery to the brain, this can be achieved in various ways. For instance, material can be delivered intrastriatally e.g., by injection. Injection can be performed stereotactically via a craniotomy.

### Packaging and Promoters Generally

[0438] Ways to package RNA-targeting effector protein (Cas13b proteins) coding nucleic acid molecules, e.g., DNA, into vectors, e.g., viral vectors, to mediate genome modification in vivo include:
[0439] Single virus vector:
   [0440] Vector containing two or more expression cassettes:
   [0441] Promoter-nucleic acid-targeting effector protein coding nucleic acid molecule—terminator
   [0442] Promoter-guide RNA1-terminator
   [0443] Promoter-guide RNA (N)-terminator (up to size limit of vector)
[0444] Double virus vector:
   [0445] Vector 1 containing one expression cassette for driving the expression of RNA-targeting effector protein (Cas13b)
   [0446] Promoter-RNA-targeting effector (Cas13b) protein coding nucleic acid molecule-terminator
   [0447] Vector 2 containing one more expression cassettes for driving the expression of one or more guideRNAs or crRNAs
   [0448] Promoter-guide RNA1 or crRNA1-terminator
   [0449] Promoter-guide RNA1 (N) or crRNA1 (N)-terminator (up to size limit of vector).

[0450] The promoter used to drive RNA-targeting effector protein coding nucleic acid molecule expression can include AAV ITR can serve as a promoter: this is advantageous for eliminating the need for an additional promoter element (which can take up space in the vector). The additional space freed up can be used to drive the expression of additional elements (gRNA, etc.). Also, ITR activity is relatively weaker, so can be used to reduce potential toxicity due to over expression of nucleic acid-targeting effector protein. For ubiquitous expression, can use promoters: CMV, CAG, CBh, PGK, SV40, Ferritin heavy or light chains, etc. For brain or other CNS expression, can use promoters: SynapsinI for all neurons, CaMKIIalpha for excitatory neurons, GAD67 or GAD65 or VGAT for GABAergic neurons, etc. For liver expression, can use Albumin promoter. For lung expression, can use SP-B. For endothelial cells, can use ICAM. For hematopoietic cells can use IFNbeta or CD45. For Osteoblasts can use OG-2. The promoter used to drive guide RNA can include: Pol III promoters such as U6 or H1; Pol II promoter and intronic cassettes to express guide RNA or crRNA.

### Adeno Associated Virus (AAV)

[0451] Cas13b and one or more guide RNA or crRNA can be delivered using adeno associated virus (AAV), lentivirus, adenovirus or other plasmid or viral vector types, in particular, using formulations and doses from, for example, U.S. Pat. No. 8,454,972 (formulations, doses for adenovirus), U.S. Pat. No. 8,404,658 (formulations, doses for AAV) and U.S. Pat. No. 5,846,946 (formulations, doses for DNA plasmids) and from clinical trials and publications regarding the clinical trials involving lentivirus, AAV and adenovirus. For examples, for AAV, the route of administration, formulation and dose can be as in U.S. Pat. No. 8,454,972 and as in clinical trials involving AAV. For Adenovirus, the route of administration, formulation and dose can be as in U.S. Pat. No. 8,404,658 and as in clinical trials involving adenovirus. For plasmid delivery, the route of administration, formulation and dose can be as in U.S. Pat. No. 5,846,946 and as in clinical studies involving plasmids. Doses may be based on or extrapolated to an average 70 kg individual (e.g., a male adult human), and can be adjusted for patients, subjects, mammals of different weight and species. Frequency of administration is within the ambit of the medical or veterinary practitioner (e.g., physician, veterinarian), depending on usual factors including the age, sex, general health, other conditions of the patient or subject and the particular condition or symptoms being addressed. The viral vectors can be injected into the tissue of interest. For cell-type specific genome modification, the expression of RNA-targeting effector protein (Cas13b effector protein) can be driven by a cell-type specific promoter. For example, liver-specific expression might use the Albumin promoter and neuron-specific expression (e.g., for targeting CNS disorders) might use the Synapsin I promoter. In terms of in vivo delivery, AAV is advantageous over other viral vectors for a couple of reasons: Low toxicity (this may be due to the purification method not requiring ultra centrifugation of cell particles that can activate the immune response) and Low probability of causing insertional mutagenesis because it doesn't integrate into the host genome.

[0452] AAV has a packaging limit of 4.5 or 4.75 Kb. This means that the RNA-targeting effector protein (Cas13b effector protein) coding sequence as well as a promoter and transcription terminator have to be all fit into the same viral vector. As to AAV, the AAV can be AAV1, AAV2, AAV5 or any combination thereof. One can select the AAV of the AAV with regard to the cells to be targeted; e.g., one can select AAV serotypes 1, 2, 5 or a hybrid capsid AAV1, AAV2, AAV5 or any combination thereof for targeting brain or neuronal cells; and one can select AAV4 for targeting cardiac tissue. AAV8 is useful for delivery to the liver. The herein promoters and vectors are preferred individually. A tabulation of certain AAV serotypes as to these cells (see Grimm, D. et al, J. Virol. 82: 5887-5911 (2008)) is as follows:

| Cell Line | AAV-1 | AAV-2 | AAV-3 | AAV-4 | AAV-5 | AAV-6 | AAV-8 | AAV-9 |
|---|---|---|---|---|---|---|---|---|
| Huh-7 | 13 | 100 | 2.5 | 0.0 | 0.1 | 10 | 0.7 | 0.0 |
| HEK293 | 25 | 100 | 2.5 | 0.1 | 0.1 | 5 | 0.7 | 0.1 |
| HeLa | 3 | 100 | 2.0 | 0.1 | 6.7 | 1 | 0.2 | 0.1 |
| HepG2 | 3 | 100 | 16.7 | 0.3 | 1.7 | 5 | 0.3 | ND |
| Hep1A | 20 | 100 | 0.2 | 1.0 | 0.1 | 1 | 0.2 | 0.0 |
| 911 | 17 | 100 | 11 | 0.2 | 0.1 | 17 | 0.1 | ND |
| CHO | 100 | 100 | 14 | 1.4 | 333 | 50 | 10 | 1.0 |
| COS | 33 | 100 | 33 | 3.3 | 5.0 | 14 | 2.0 | 0.5 |
| MeWo | 10 | 100 | 20 | 0.3 | 6.7 | 10 | 1.0 | 0.2 |
| NIH3T3 | 10 | 100 | 2.9 | 2.9 | 0.3 | 10 | 0.3 | ND |
| A549 | 14 | 100 | 20 | ND | 0.5 | 10 | 0.5 | 0.1 |
| HT1180 | 20 | 100 | 10 | 0.1 | 0.3 | 33 | 0.5 | 0.1 |
| Monocytes | 1111 | 100 | ND | ND | 125 | 1429 | ND | ND |
| Immature DC | 2500 | 100 | ND | ND | 222 | 2857 | ND | ND |
| Mature DC | 2222 | 100 | ND | ND | 333 | 3333 | ND | ND |

### Lentivirus

[0453] Lentiviruses are complex retroviruses that have the ability to infect and express their genes in both mitotic and post-mitotic cells. The most commonly known lentivirus is the human immunodeficiency virus (HIV), which uses the envelope glycoproteins of other viruses to target a broad range of cell types. Lentiviruses may be prepared as follows. After cloning pCasES10 (which contains a lentiviral transfer plasmid backbone), HEK293FT at low passage (p=5) were seeded in a T-75 flask to 50% confluence the day before transfection in DMEM with 10% fetal bovine serum and without antibiotics. After 20 hours, media was changed to OptiMEM (serum-free) media and transfection was done 4 hours later. Cells were transfected with 10 μg of lentiviral transfer plasmid (pCasES10) and the following packaging plasmids: 5 μg of pMD2.G (VSV-g pseudotype), and 7.5 ug of psPAX2 (gag/pol/rev/tat). Transfection was done in 4 mL OptiMEM with a cationic lipid delivery agent (50 uL Lipofectamine 2000 and 100 ul Plus reagent). After 6 hours, the media was changed to antibiotic-free DMEM with 10% fetal bovine serum. These methods use serum during cell culture, but serum-free methods are preferred.

[0454] Lentivirus may be purified as follows. Viral supernatants were harvested after 48 hours. Supernatants were first cleared of debris and filtered through a 0.45 um low protein binding (PVDF) filter. They were then spun in a ultracentrifuge for 2 hours at 24,000 rpm. Viral pellets were resuspended in 50 ul of DMEM overnight at 4C. They were then aliquotted and immediately frozen at −80° C.

[0455] In another embodiment, minimal non-primate lentiviral vectors based on the equine infectious anemia virus (EIAV) are also contemplated, especially for ocular gene therapy (see, e.g., Balagaan, J Gene Med 2006; 8: 275-285). In another embodiment, RetinoStat®, an equine inffctious anemia virus-based lentiviral gene therapy vector that expresses angiostatic proteins endostatin and angiostatin that is delivered via a subretinal injection for the treatment of the web form of age-related macular degeneration is also contemplated (see, e.g., Binley et al., HUMAN GENE THERAPY 23:980-991 (September 2012)) and this vector may be modified for the nucleic acid-targeting system of the present invention.

[0456] In another embodiment, self-inactivating lentiviral vectors with an siRNA targeting a common exon shared by HIV tat/rev, a nucleolar-localizing TAR decoy, and an anti-CCR5-specific hammerhead ribozyme (see, e.g., DiGiusto et al. (2010) Sci Transl Med 2:36ra43) may be used/and or adapted to the nucleic acid-targeting system of the present invention. A minimum of 2.5×10⁶ CD34+cells per kilogram patient weight may be collected and prestimulated for 16 to 20 hours in X-VIVO 15 medium (Lonza) containing 2 μmol/L-glutamine, stem cell factor (100 ng/ml), Flt-3 ligand (Flt-3L) (100 ng/ml), and thrombopoietin (10 ng/ml) (CellGenix) at a density of 2×10⁶ cells/ml. Prestimulated cells may be transduced with lentiviral at a multiplicity of infection of 5 for 16 to 24 hours in 75-cm² tissue culture flasks coated with fibronectin (25 mg/cm²) (RetroNectin, Takara Bio Inc.).

[0457] Lentiviral vectors have been disclosed as in the treatment for Parkinson's Disease, see, e.g., US Patent Publication No. 20120295960 and U.S. Pat. Nos. 7,303,910 and 7,351,585. Lentiviral vectors have also been disclosed for the treatment of ocular diseases, see e.g., US Patent Publication Nos. 20060281180, 20090007284, US20110117189; US20090017543; US20070054961, US20100317109. Lentiviral vectors have also been disclosed for delivery to the brain, see, e.g., US Patent Publication Nos. US20110293571; US20110293571, US20040013648, US20070025970, US20090111106 and U.S. Pat. No. 7,259,015.

### RNA Delivery

[0458] RNA delivery: The nucleic acid-targeting Cas13b protein, and/or guide RNA, can also be delivered in the form of RNA. mRNA can be synthesized using a PCR cassette containing the following elements: T7_promoter-kozak sequence (GCCACC)-effector protrein-3′ UTR from beta globin-polyA tail (a string of 120 or more adenines). The cassette can be used for transcription by T7 polymerase. Guide RNAs or crRNAs can also be transcribed using in vitro transcription from a cassette containing T7_promoter-GG-guide RNA or crRNA sequence.

Particle Delivery Systems and/or Formulations:

[0459] Several types of particle delivery systems and/or formulations are known to be useful in a diverse spectrum of biomedical applications. In general, a particle is defined as a small object that behaves as a whole unit with respect to its transport and properties. Particles are further classified according to diameter. Coarse particles cover a range between 2,500 and 10,000 nanometers. Fine particles are sized between 100 and 2,500 nanometers. Ultrafine particles, or nanoparticles, are generally between 1 and 100 nanometers in size. The basis of the 100-nm limit is the fact that novel properties that differentiate particles from the bulk material typically develop at a critical length scale of under 100 nm.

[0460] As used herein, a particle delivery system/formulation is defined as any biological delivery system/formulation which includes a particle in accordance with the present invention. A particle in accordance with the present invention is any entity having a greatest dimension (e.g. diameter) of less than 100 microns (μm). In some embodiments, inventive particles have a greatest dimension of less than 10 μm. In some embodiments, inventive particles have a greatest dimension of less than 2000 nanometers (nm). In some embodiments, inventive particles have a greatest dimension of less than 1000 nanometers (nm). In some embodiments, inventive particles have a greatest dimension of less than 900 nm, 800 nm, 700 nm, 600 nm, 500 nm, 400 nm, 300 nm, 200 nm, or 100 nm. Typically, inventive particles have a greatest dimension (e.g., diameter) of 500 nm or less. In some embodiments, inventive particles have a greatest dimension (e.g., diameter) of 250 nm or less. In some embodiments, inventive particles have a greatest dimension (e.g., diameter) of 200 nm or less. In some embodiments, inventive particles have a greatest dimension (e.g., diameter) of 150 nm or less. In some embodiments, inventive particles have a greatest dimension (e.g., diameter) of 100 nm or less. Smaller particles, e.g., having a greatest dimension of 50 nm or less are used in some embodiments of the invention. In some embodiments, inventive particles have a greatest dimension ranging between 25 nm and 200 nm.

[0461] Particle characterization (including e.g., characterizing morphology, dimension, etc.) is done using a variety of different techniques. Common techniques are electron microscopy (TEM, SEM), atomic force microscopy (AFM), dynamic light scattering (DLS), X-ray photoelectron spectroscopy (XPS), powder X-ray diffraction (XRD), Fourier transform infrared spectroscopy (FTIR), matrix-assisted laser desorption/ionization time-of-flight mass spectrometry (MALDI-TOF), ultraviolet-visible spectroscopy, dual polarisation interferometry and nuclear magnetic resonance (NMR). Characterization (dimension measurements) may be made as to native particles (i.e., preloading) or after loading of the cargo (herein cargo refers to e.g., one or more components of CRISPR-Cas13b system e.g., Cas13b enzyme or mRNA or guide RNA, or any combination thereof, and may include additional carriers and/or excipients) to provide particles of an optimal size for delivery for any in vitro, ex vivo and/or in vivo application of the present invention. In certain preferred embodiments, particle dimension (e.g., diameter) characterization is based on measurements using dynamic laser scattering (DLS). Mention is made of U.S. Pat. Nos. 8,709,843; 6,007,845; 5,855,913; 5,985,309; 5,543,158; and the publication by James E. Dahlman and Carmen Barnes et al. Nature Nanotechnology (2014) published online 11 May 2014, doi:10.1038/nnano.2014.84, concerning particles, methods of making and using them and measurements thereof. See also Dahlman et al. “Orthogonal gene control with a catalytically active Cas9 nuclease,” Nature Biotechnology 33, 1159-1161 (November, 2015)

[0462] Particles delivery systems within the scope of the present invention may be provided in any form, including but not limited to solid, semi-solid, emulsion, or colloidal particles. As such any of the delivery systems described herein, including but not limited to, e.g., lipid-based systems, liposomes, micelles, microvesicles, exosomes, or gene gun may be provided as particle delivery systems within the scope of the present invention.

### Particles

[0463] Cas13b mRNA and guide RNA or crRNA may be delivered simultaneously using particles or lipid envelopes; for instance, CRISPR enzyme and RNA of the invention, e.g., as a complex, can be delivered via a particle as in Dahlman et al., WO2015089419 A2 and documents cited therein, such as 7C1 (see, e.g., James E. Dahlman and Carmen Barnes et al. Nature Nanotechnology (2014) published online 11 May 2014, doi:10.1038/nnano.2014.84), e.g., delivery particle comprising lipid or lipidoid and hydrophilic polymer, e.g., cationic lipid and hydrophilic polymer, for instance wherein the cationic lipid comprises 1,2-dioleoyl-3-trimethylammonium-propane (DOTAP) or 1,2-ditetradecanoyl-sn-glycero-3-phosphocholine (DMPC) and/or wherein the hydrophilic polymer comprises ethylene glycol or polyethylene glycol (PEG); and/or wherein the particle further comprises cholesterol (e.g., particle from formulation 1=DOTAP 100, DMPC 0, PEG 0, Cholesterol 0; formulation number 2=DOTAP 90, DMPC 0, PEG 10, Cholesterol 0; formulation number 3=DOTAP 90, DMPC 0, PEG 5, Cholesterol 5), wherein particles are formed using an efficient, multistep process wherein first, effector protein and RNA are mixed together, e.g., at a 1:1 molar ratio, e.g., at room temperature, e.g., for 30 minutes, e.g., in sterile, nuclease free 1×PBS; and separately, DOTAP, DMPC, PEG, and cholesterol as applicable for the formulation are dissolved in alcohol, e.g., 100% ethanol; and, the two solutions are mixed together to form particles containing the complexes). Cas13b effector protein mRNA and guide RNA may be delivered simultaneously using particles or lipid envelopes. This Dahlman et al technology can be applied in the instant invention. An epoxide-modified lipid-polymer may be utilized to deliver the nucleic acid-targeting system of the present invention to pulmonary, cardiovascular or renal cells, however, one of skill in the art may adapt the system to deliver to other target organs. Dosage ranging from about 0.05 to about 0.6 mg/kg are envisioned. Dosages over several days or weeks are also envisioned, with a total dosage of about 2 mg/kg. For example, Su X, Fricke J, Kavanagh D G, Irvine D J (“In vitro and in vivo mRNA delivery using lipid-enveloped pH-responsive polymer nanoparticles” Mol Pharm. 2011 Jun. 6; 8(3):774-87. doi: 10.1021/mp100390w. Epub 2011 Apr. 1) describes biodegradable core-shell structured particles with a poly(β-amino ester) (PBAE) core enveloped by a phospholipid bilayer shell. These were developed for in vivo mRNA delivery. The pH-responsive PBAE component was chosen to promote endosome disruption, while the lipid surface layer was selected to minimize toxicity of the polycation core. Such are, therefore, preferred for delivering RNA of the present invention.

[0464] In one embodiment, particles based on self-assembling bioadhesive polymers are contemplated, which may be applied to oral delivery of peptides, intravenous delivery of peptides and nasal delivery of peptides, all to the brain. Other embodiments, such as oral absorption and ocular delivery of hydrophobic drugs are also contemplated. The molecular envelope technology involves an engineered polymer envelope which is protected and delivered to the site of the disease (see, e.g., Mazza, M. et al. ACSNano, 2013. 7(2): 1016-1026; Siew, A., et al. Mol Pharm, 2012. 9(1):14-28; Lalatsa, A., et al. J Contr Rel, 2012. 161(2):523-36; Lalatsa, A., et al., Mol Pharm, 2012. 9(6):1665-80; Lalatsa, A., et al. Mol Pharm, 2012. 9(6):1764-74; Garrett, N. L., et al. J Biophotonics, 2012. 5(5-6):458-68; Garrett, N. L., et al. J Raman Spect, 2012. 43(5):681-688; Ahmad, S., et al. J Royal Soc Interface 2010. 7:S423-33; Uchegbu, I. F. Expert Opin Drug Deliv, 2006. 3(5):629-40; Qu, X., et al. Biomacromolecules, 2006. 7(12):3452-9 and Uchegbu, I. F., et al. Int J Pharm, 2001. 224:185-199). Doses of about 5 mg/kg are contemplated, with single or multiple doses, depending on the target tissue.

[0465] Regarding particles, see, also Alabi et al., Proc Natl Acad Sci USA. 2013 Aug. 6; 110(32):12881-6; Zhang et al., Adv Mater. 2013 Sep. 6; 25(33):4641-5; Jiang et al., Nano Lett. 2013 Mar. 13; 13(3):1059-64; Karagiannis et al., ACS Nano. 2012 Oct. 23; 6(10):8484-7; Whitehead et al., ACS Nano. 2012 Aug. 28; 6(8):6922-9 and Lee et al., Nat Nanotechnol. 2012 Jun. 3; 7(6):389-93.

[0466] US patent application 20110293703 relates to lipidoid compounds are also particularly useful in the administration of polynucleotides, which may be applied to deliver the nucleic acid-targeting system of the present invention. In one aspect, the aminoalcohol lipidoid compounds are combined with an agent to be delivered to a cell or a subject to form microparticles, nanoparticles, liposomes, or micelles. The agent to be delivered by the particles, liposomes, or micelles may be in the form of a gas, liquid, or solid, and the agent may be a polynucleotide, protein, peptide, or small molecule. The minoalcohol lipidoid compounds may be combined with other aminoalcohol lipidoid compounds, polymers (synthetic or natural), surfactants, cholesterol, carbohydrates, proteins, lipids, etc. to form the particles. These particles may then optionally be combined with a pharmaceutical excipient to form a pharmaceutical composition. US Patent Publication No. 20110293703 also provides methods of preparing the aminoalcohol lipidoid compounds. One or more equivalents of an amine are allowed to react with one or more equivalents of an epoxide-terminated compound under suitable conditions to form an aminoalcohol lipidoid compound of the present invention. In certain embodiments, all the amino groups of the amine are fully reacted with the epoxide-terminated compound to form tertiary amines. In other embodiments, all the amino groups of the amine are not fully reacted with the epoxide-terminated compound to form tertiary amines thereby resulting in primary or secondary amines in the aminoalcohol lipidoid compound. These primary or secondary amines are left as is or may be reacted with another electrophile such as a different epoxide-terminated compound. As will be appreciated by one skilled in the art, reacting an amine with less than excess of epoxide-terminated compound will result in a plurality of different aminoalcohol lipidoid compounds with various numbers of tails. Certain amines may be fully functionalized with two epoxide-derived compound tails while other molecules will not be completely functionalized with epoxide-derived compound tails. For example, a diamine or polyamine may include one, two, three, or four epoxide-derived compound tails off the various amino moieties of the molecule resulting in primary, secondary, and tertiary amines. In certain embodiments, all the amino groups are not fully functionalized. In certain embodiments, two of the same types of epoxide-terminated compounds are used. In other embodiments, two or more different epoxide-terminated compounds are used. The synthesis of the aminoalcohol lipidoid compounds is performed with or without solvent, and the synthesis may be performed at higher temperatures ranging from 30−100° C., preferably at approximately 50-90° C. The prepared aminoalcohol lipidoid compounds may be optionally purified. For example, the mixture of aminoalcohol lipidoid compounds may be purified to yield an aminoalcohol lipidoid compound with a particular number of epoxide-derived compound tails. Or the mixture may be purified to yield a particular stereo- or regioisomer. The aminoalcohol lipidoid compounds may also be alkylated using an alkyl halide (e.g., methyl iodide) or other alkylating agent, and/or they may be acylated.

[0467] US Patent Publication No. 20110293703 also provides libraries of aminoalcohol lipidoid compounds prepared by the inventive methods. These aminoalcohol lipidoid compounds may be prepared and/or screened using high-throughput techniques involving liquid handlers, robots, microtiter plates, computers, etc. In certain embodiments, the aminoalcohol lipidoid compounds are screened for their ability to transfect polynucleotides or other agents (e.g., proteins, peptides, small molecules) into the cell. US Patent Publication No. 20130302401 relates to a class of poly(beta-amino alcohols) (PBAAs) has been prepared using combinatorial polymerization. The inventive PBAAs may be used in biotechnology and biomedical applications as coatings (such as coatings of films or multilayer films for medical devices or implants), additives, materials, excipients, non-biofouling agents, micropatterning agents, and cellular encapsulation agents. When used as surface coatings, these PBAAs elicited different levels of inflammation, both in vitro and in vivo, depending on their chemical structures. The large chemical diversity of this class of materials allowed us to identify polymer coatings that inhibit macrophage activation in vitro. Furthermore, these coatings reduce the recruitment of inflammatory cells, and reduce fibrosis, following the subcutaneous implantation of carboxylated polystyrene microparticles. These polymers may be used to form polyelectrolyte complex capsules for cell encapsulation. The invention may also have many other biological applications such as antimicrobial coatings, DNA or siRNA delivery, and stem cell tissue engineering. The teachings of US Patent Publication No. 20130302401 may be applied to the nucleic acid-targeting system of the present invention.

[0468] In another embodiment, lipid nanoparticles (LNPs) are contemplated. An antitransthyretin small interfering RNA has been encapsulated in lipid nanoparticles and delivered to humans (see, e.g., Coelho et al., N Engl J Med 2013; 369:819-29), and such a system may be adapted and applied to the nucleic acid-targeting system of the present invention. Doses of about 0.01 to about 1 mg per kg of body weight administered intravenously are contemplated. Medications to reduce the risk of infusion-related reactions are contemplated, such as dexamethasone, acetampinophen, diphenhydramine or cetirizine, and ranitidine are contemplated. Multiple doses of about 0.3 mg per kilogram every 4 weeks for five doses are also contemplated. LNPs have been shown to be highly effective in delivering siRNAs to the liver (see, e.g., Tabernero et al., Cancer Discovery, April 2013, Vol. 3, No. 4, pages 363-470) and are therefore contemplated for delivering RNA encoding nucleic acid-targeting effector protein to the liver. A dosage of about four doses of 6 mg/kg of the LNP every two weeks may be contemplated. Tabernero et al. demonstrated that tumor regression was observed after the first 2 cycles of LNPs dosed at 0.7 mg/kg, and by the end of 6 cycles the patient had achieved a partial response with complete regression of the lymph node metastasis and substantial shrinkage of the liver tumors. A complete response was obtained after 40 doses in this patient, who has remained in remission and completed treatment after receiving doses over 26 months. Two patients with RCC and extrahepatic sites of disease including kidney, lung, and lymph nodes that were progressing following prior therapy with VEGF pathway inhibitors had stable disease at all sites for approximately 8 to 12 months, and a patient with PNET and liver metastases continued on the extension study for 18 months (36 doses) with stable disease. However, the charge of the LNP must be taken into consideration. As cationic lipids combined with negatively charged lipids to induce nonbilayer structures that facilitate intracellular delivery. Because charged LNPs are rapidly cleared from circulation following intravenous injection, ionizable cationic lipids with pKa values below 7 were developed (see, e.g., Rosin et al, Molecular Therapy, vol. 19, no. 12, pages 1286-2200, December 2011). Negatively charged polymers such as RNA may be loaded into LNPs at low pH values (e.g., pH 4) where the ionizable lipids display a positive charge. However, at physiological pH values, the LNPs exhibit a low surface charge compatible with longer circulation times. Four species of ionizable cationic lipids have been focused upon, namely 1,2-dilineoyl-3-dimethylammonium-propane (DLinDAP), 1,2-dilinoleyloxy-3-N,N-dimethylaminopropane (DLinDMA), 1,2-dilinoleyloxy-keto-N,N-dimethyl-3-aminopropane (DLinKDMA), and 1,2-dilinoleyl-4-(2-dimethylaminoethyl)[1,3]-dioxolane (DLinKC2-DMA). It has been shown that LNP siRNA systems containing these lipids exhibit remarkably different gene silencing properties in hepatocytes in vivo, with potencies varying according to the series DLinKC2-DMA>DLinKDMA>DLinDMA>>DLinDAP employing a Factor VII gene silencing model (see, e.g., Rosin et al, Molecular Therapy, vol. 19, no. 12, pages 1286-2200, December 2011). A dosage of 1 μg/ml of LNP or CRISPR-Cas RNA in or associated with the LNP may be contemplated, especially for a formulation containing DLinKC2-DMA.

[0469] Preparation of LNPs and CRISPR-Cas13b encapsulation may be used/and or adapted from Rosin et al, Molecular Therapy, vol. 19, no. 12, pages 1286-2200, December 2011). The cationic lipids 1,2-dilineoyl-3-dimethylammonium-propane (DLinDAP), 1,2-dilinoleyloxy-3-N,N-dimethylaminopropane (DLinDMA), 1,2-dilinoleyloxyketo-N,N-dimethyl-3-aminopropane (DLinK-DMA), 1,2-dilinoleyl-4-(2-dimethylaminoethyl)-[1,3]-dioxolane (DLinKC2-DMA), (3-o-[2″-(methoxypolyethyleneglycol 2000) succinoyl]-1,2-dimyristoyl-sn-glycol (PEG-S-DMG), and R-3-[(w-methoxy-poly(ethylene glycol)2000) carbamoyl]-1,2-dimyristyloxlpropyl-3-amine (PEG-C-DOMG) may be provided by Tekmira Pharmaceuticals (Vancouver, Canada) or synthesized. Cholesterol may be purchased from Sigma (St Louis, Mo.). The specific nucleic acid-targeting complex (CRISPR-Cas) RNA may be encapsulated in LNPs containing DLinDAP, DLinDMA, DLinK-DMA, and DLinKC2-DMA (cationic lipid:DSPC:CHOL:PEGS-DMG or PEG-C-DOMG at 40:10:40:10 molar ratios). When required, 0.2% SP-DiOC18 (Invitrogen, Burlington, Canada) may be incorporated to assess cellular uptake, intracellular delivery, and biodistribution. Encapsulation may be performed by dissolving lipid mixtures comprised of cationic lipid:DSPC:cholesterol:PEG-c-DOMG (40:10:40:10 molar ratio) in ethanol to a final lipid concentration of 10 mmol/1. This ethanol solution of lipid may be added drop-wise to 50 mmol/1 citrate, pH 4.0 to form multilamellar vesicles to produce a final concentration of 30% ethanol vol/vol. Large unilamellar vesicles may be formed following extrusion of multilamellar vesicles through two stacked 80 nm Nuclepore polycarbonate filters using the Extruder (Northern Lipids, Vancouver, Canada). Encapsulation may be achieved by adding RNA dissolved at 2 mg/ml in 50 mmol/1 citrate, pH 4.0 containing 30% ethanol vol/vol drop-wise to extruded preformed large unilamellar vesicles and incubation at 31° C. for 30 minutes with constant mixing to a final RNA/lipid weight ratio of 0.06/1 wt/wt. Removal of ethanol and neutralization of formulation buffer were performed by dialysis against phosphate-buffered saline (PBS), pH 7.4 for 16 hours using Spectra/Por 2 regenerated cellulose dialysis membranes. Particle size distribution may be determined by dynamic light scattering using a NICOMP 370 particle sizer, the vesicle/intensity modes, and Gaussian fitting (Nicomp Particle Sizing, Santa Barbara, Calif.). The particle size for all three LNP systems may be ˜70 nm in diameter. RNA encapsulation efficiency may be determined by removal of free RNA using VivaPureD MiniH columns (Sartorius Stedim Biotech) from samples collected before and after dialysis. The encapsulated RNA may be extracted from the eluted particles and quantified at 260 nm. RNA to lipid ratio was determined by measurement of cholesterol content in vesicles using the Cholesterol E enzymatic assay from Wako Chemicals USA (Richmond, Va.). In conjunction with the herein discussion of LNPs and PEG lipids, PEGylated liposomes or LNPs are likewise suitable for delivery of a nucleic acid-targeting system or components thereof. Preparation of large LNPs may be used/and or adapted from Rosin et al, Molecular Therapy, vol. 19, no. 12, pages 1286-2200, December 2011. A lipid premix solution (20.4 mg/ml total lipid concentration) may be prepared in ethanol containing DLinKC2-DMA, DSPC, and cholesterol at 50:10:38.5 molar ratios. Sodium acetate may be added to the lipid premix at a molar ratio of 0.75:1 (sodium acetate:DLinKC2-DMA). The lipids may be subsequently hydrated by combining the mixture with 1.85 volumes of citrate buffer (10 mmol/1, pH 3.0) with vigorous stirring, resulting in spontaneous liposome formation in aqueous buffer containing 35% ethanol. The liposome solution may be incubated at 37° C. to allow for time-dependent increase in particle size. Aliquots may be removed at various times during incubation to investigate changes in liposome size by dynamic light scattering (Zetasizer Nano Z S, Malvern Instruments, Worcestershire, UK). Once the desired particle size is achieved, an aqueous PEG lipid solution (stock=10 mg/ml PEG-DMG in 35% (vol/vol) ethanol) may be added to the liposome mixture to yield a final PEG molar concentration of 3.5% of total lipid. Upon addition of PEG-lipids, the liposomes should their size, effectively quenching further growth. RNA may then be added to the empty liposomes at a RNA to total lipid ratio of approximately 1:10 (wt:wt), followed by incubation for 30 minutes at 37° C. to form loaded LNPs. The mixture may be subsequently dialyzed overnight in PBS and filtered with a 0.45-μm syringe filter.

[0470] Spherical Nucleic Acid (SNA™) constructs and other particles (particularly gold particles) are also contemplated as a means to delivery nucleic acid-targeting system to intended targets. Significant data show that AuraSense Therapeutics' Spherical Nucleic Acid (SNA™) constructs, based upon nucleic acid-functionalized gold particles, are useful.

[0471] Literature that may be employed in conjunction with herein teachings include: Cutler et al., J. Am. Chem. Soc. 2011 133:9254-9257, Hao et al., Small. 2011 7:3158-3162, Zhang et al., ACS Nano. 2011 5:6962-6970, Cutler et al., J. Am. Chem. Soc. 2012 134:1376-1391, Young et al., Nano Lett. 2012 12:3867-71, Zheng et al., Proc. Natl. Acad. Sci. USA. 2012 109:11975-80, Mirkin, Nanomedicine 2012 7:635-638 Zhang et al., J. Am. Chem. Soc. 2012 134:16488-1691, Weintraub, Nature 2013 495:S14-S16, Choi et al., Proc. Natl. Acad. Sci. USA. 2013 110(19):7625-7630, Jensen et al., Sci. Transl. Med. 5, 209ra152 (2013) and Mirkin, et al., Small, 10:186-192.

[0472] Self-assembling particles with RNA may be constructed with polyethyleneimine (PEI) that is PEGylated with an Arg-Gly-Asp (RGD) peptide ligand attached at the distal end of the polyethylene glycol (PEG). This system has been used, for example, as a means to target tumor neovasculature expressing integrins and deliver siRNA inhibiting vascular endothelial growth factor receptor-2 (VEGF R2) expression and thereby achieve tumor angiogenesis (see, e.g., Schiffelers et al., Nucleic Acids Research, 2004, Vol. 32, No. 19). Nanoplexes may be prepared by mixing equal volumes of aqueous solutions of cationic polymer and nucleic acid to give a net molar excess of ionizable nitrogen (polymer) to phosphate (nucleic acid) over the range of 2 to 6. The electrostatic interactions between cationic polymers and nucleic acid resulted in the formation of polyplexes with average particle size distribution of about 100 nm, hence referred to here as nanoplexes. A dosage of about 100 to 200 mg of nucleic acid-targeting complex RNA is envisioned for delivery in the self-assembling particles of Schiffelers et al.

[0473] The nanoplexes of Bartlett et al. (PNAS, Sep. 25, 2007, vol. 104, no. 39) may also be applied to the present invention. The nanoplexes of Bartlett et al. are prepared by mixing equal volumes of aqueous solutions of cationic polymer and nucleic acid to give a net molar excess of ionizable nitrogen (polymer) to phosphate (nucleic acid) over the range of 2 to 6. The electrostatic interactions between cationic polymers and nucleic acid resulted in the formation of polyplexes with average particle size distribution of about 100 nm, hence referred to here as nanoplexes. The DOTA-siRNA of Bartlett et al. was synthesized as follows: 1,4,7,10-tetraazacyclododecane-1,4,7,10-tetraacetic acid mono(N-hydroxysuccinimide ester) (DOTA-NHSester) was ordered from Macrocyclics (Dallas, Tex.). The amine modified RNA sense strand with a 100-fold molar excess of DOTA-NHS-ester in carbonate buffer (pH 9) was added to a microcentrifuge tube. The contents were reacted by stirring for 4 h at room temperature. The DOTA-RNAsense conjugate was ethanol-precipitated, resuspended in water, and annealed to the unmodified antisense strand to yield DOTA-siRNA. All liquids were pretreated with Chelex-100 (Bio-Rad, Hercules, Calif.) to remove trace metal contaminants. Tf-targeted and nontargeted siRNA particles may be formed by using cyclodextrin-containing polycations. Typically, particles were formed in water at a charge ratio of 3 (+/−) and an siRNA concentration of 0.5 g/liter. One percent of the adamantane-PEG molecules on the surface of the targeted particles were modified with Tf (adamantane-PEG-Tf). The particles were suspended in a 5% (wt/vol) glucose carrier solution for injection.

[0474] Davis et al. (Nature, Vol 464, 15 Apr. 2010) conducts a RNA clinical trial that uses a targeted particle-delivery system (clinical trial registration number NCT00689065). Patients with solid cancers refractory to standard-of-care therapies are administered doses of targeted particles on days 1, 3, 8 and 10 of a 21-day cycle by a 30-min intravenous infusion. The particles comprise, consist essentially of, or consist of a synthetic delivery system containing: (1) a linear, cyclodextrin-based polymer (CDP), (2) a human transferrin protein (TF) targeting ligand displayed on the exterior of the nanoparticle to engage TF receptors (TFR) on the surface of the cancer cells, (3) a hydrophilic polymer (polyethylene glycol (PEG) used to promote nanoparticle stability in biological fluids), and (4) siRNA designed to reduce the expression of the RRM2 (sequence used in the clinic was previously denoted siR2B+5). The TFR has long been known to be upregulated in malignant cells, and RRM2 is an established anti-cancer target. These particles (clinical version denoted as CALAA-01) have been shown to be well tolerated in multi-dosing studies in non-human primates. Although a single patient with chronic myeloid leukaemia has been administered siRNAby liposomal delivery, Davis et al.'s clinical trial is the initial human trial to systemically deliver siRNA with a targeted delivery system and to treat patients with solid cancer. To ascertain whether the targeted delivery system can provide effective delivery of functional siRNA to human tumours, Davis et al. investigated biopsies from three patients from three different dosing cohorts; patients A, B and C, all of whom had metastatic melanoma and received CALAA-01 doses of 18, 24 and 30 mg m⁻² siRNA, respectively. Similar doses may also be contemplated for the nucleic acid-targeting system of the present invention. The delivery of the invention may be achieved with particles containing a linear, cyclodextrin-based polymer (CDP), a human transferrin protein (TF) targeting ligand displayed on the exterior of the particle to engage TF receptors (TFR) on the surface of the cancer cells and/or a hydrophilic polymer (for example, polyethylene glycol (PEG) used to promote particle stability in biological fluids).

[0475] In terms of this invention, it is preferred to have one or more components of RNA-targeting complex, e.g., nucleic acid-targeting effector (Cas13b) protein or mRNA therefor, or guide RNA or crRNA delivered using particles or lipid envelopes. Other delivery systems or vectors are may be used in conjunction with the particle aspects of the invention. Particles encompassed in the present invention may be provided in different forms, e.g., as solid particles (e.g., metal such as silver, gold, iron, titanium), non-metal, lipid-based solids, polymers), suspensions of particles, or combinations thereof. Metal, dielectric, and semiconductor particles may be prepared, as well as hybrid structures (e.g., core-shell particles). Particles made of semiconducting material may also be labeled quantum dots if they are small enough (typically sub 10 nm) that quantization of electronic energy levels occurs. Such nanoscale particles are used in biomedical applications as drug carriers or imaging agents and may be adapted for similar purposes in the present invention.

[0476] Semi-solid and soft particles have been manufactured, and are within the scope of the present invention. A prototype particle of semi-solid nature is the liposome. Various types of liposome particles are currently used clinically as delivery systems for anticancer drugs and vaccines. Particles with one half hydrophilic and the other half hydrophobic are termed Janus particles and are particularly effective for stabilizing emulsions. They can self-assemble at water/oil interfaces and act as solid surfactants.

[0477] U.S. Pat. No. 8,709,843, incorporated herein by reference, provides a drug delivery system for targeted delivery of therapeutic agent-containing particles to tissues, cells, and intracellular compartments. The invention provides targeted particles comprising polymer conjugated to a surfactant, hydrophilic polymer or lipid. U.S. Pat. No. 6,007,845, incorporated herein by reference, provides particles which have a core of a multiblock copolymer formed by covalently linking a multifunctional compound with one or more hydrophobic polymers and one or more hydrophilic polymers, and contain a biologically active material. U.S. Pat. No. 5,855,913, incorporated herein by reference, provides a particulate composition having aerodynamically light particles having a tap density of less than 0.4 g/cm3 with a mean diameter of between 5 μm and 30 μm, incorporating a surfactant on the surface thereof for drug delivery to the pulmonary system. U.S. Pat. No. 5,985,309, incorporated herein by reference, provides particles incorporating a surfactant and/or a hydrophilic or hydrophobic complex of a positively or negatively charged therapeutic or diagnostic agent and a charged molecule of opposite charge for delivery to the pulmonary system. U.S. Pat. No. 5,543,158, incorporated herein by reference, provides biodegradable injectable particles having a biodegradable solid core containing a biologically active material and poly(alkylene glycol) moieties on the surface. WO2012135025 (also published as US20120251560), incorporated herein by reference, describes conjugated polyethyleneimine (PEI) polymers and conjugated aza-macrocycles (collectively referred to as “conjugated lipomer” or “lipomers”). In certain embodiments, it can be envisioned that such methods and materials of herein-cited documents, e.g., conjugated lipomers can be used in the context of the nucleic acid-targeting system to achieve in vitro, ex vivo and in vivo genomic perturbations to modify gene expression, including modulation of protein expression.

### Exosomes

[0478] Exosomes are endogenous nano-vesicles that transport RNAs and proteins, and which can deliver RNA to the brain and other target organs. To reduce immunogenicity, Alvarez-Erviti et al. (2011, Nat Biotechnol 29: 341) used self-derived dendritic cells for exosome production. Targeting to the brain was achieved by engineering the dendritic cells to express Lamp2b, an exosomal membrane protein, fused to the neuron-specific RVG peptide. Purified exosomes were loaded with exogenous RNA by electroporation. Intravenously injected RVG-targeted exosomes delivered GAPDH siRNA specifically to neurons, microglia, oligodendrocytes in the brain, resulting in a specific gene knockdown. Pre-exposure to RVG exosomes did not attenuate knockdown, and non-specific uptake in other tissues was not observed. The therapeutic potential of exosome-mediated siRNA delivery was demonstrated by the strong mRNA (60%) and protein (62%) knockdown of BACE1, a therapeutic target in Alzheimer's disease.

[0479] To obtain a pool of immunologically inert exosomes, Alvarez-Erviti et al. harvested bone marrow from inbred C57BL/6 mice with a homogenous major histocompatibility complex (MHC) haplotype. As immature dendritic cells produce large quantities of exosomes devoid of T-cell activators such as MHC-II and CD86, Alvarez-Erviti et al. selected for dendritic cells with granulocyte/macrophage-colony stimulating factor (GM-CSF) for 7 d. Exosomes were purified from the culture supernatant the following day using well-established ultracentrifugation protocols. The exosomes produced were physically homogenous, with a size distribution peaking at 80 nm in diameter as determined by particle tracking analysis (NTA) and electron microscopy. Alvarez-Erviti et al. obtained 6-12 μg of exosomes (measured based on protein concentration) per 10⁶ cells. Next, Alvarez-Erviti et al. investigated the possibility of loading modified exosomes with exogenous cargoes using electroporation protocols adapted for nanoscale applications. As electroporation for membrane particles at the nanometer scale is not well-characterized, nonspecific Cy5-labeled RNA was used for the empirical optimization of the electroporation protocol. The amount of encapsulated RNA was assayed after ultracentrifugation and lysis of exosomes. Electroporation at 400 V and 125 μF resulted in the greatest retention of RNA and was used for all subsequent experiments. Alvarez-Erviti et al. administered 150 μg of each BACE1 siRNA encapsulated in 150 μg of RVG exosomes to normal C57BL/6 mice and compared the knockdown efficiency to four controls: untreated mice, mice injected with RVG exosomes only, mice injected with BACE1 siRNA complexed to an in vivo cationic liposome reagent and mice injected with BACE1 siRNA complexed to RVG-9R, the RVG peptide conjugated to 9 D-arginines that electrostatically binds to the siRNA. Cortical tissue samples were analyzed 3 d after administration and a significant protein knockdown (45%, P<0.05, versus 62%, P<0.01) in both siRNA-RVG-9R-treated and siRNARVG exosome-treated mice was observed, resulting from a significant decrease in BACE1 mRNA levels (66% [+ or −] 15%, P<0.001 and 61% [+ or −] 13% respectively, P<0.01). Moreover, Applicants demonstrated a significant decrease (55%, P<0.05) in the total [beta]-amyloid 1-42 levels, a main component of the amyloid plaques in Alzheimer's pathology, in the RVG-exosome-treated animals. The decrease observed was greater than the β-amyloid 1-40 decrease demonstrated in normal mice after intraventricular injection of BACE1 inhibitors. Alvarez-Erviti et al. carried out 5′-rapid amplification of cDNA ends (RACE) on BACE1 cleavage product, which provided evidence of RNAi-mediated knockdown by the siRNA. Finally, Alvarez-Erviti et al. investigated whether RNA-RVG exosomes induced immune responses in vivo by assessing IL-6, IP-10, TNFα and IFN-α serum concentrations. Following exosome treatment, nonsignificant changes in all cytokines were registered similar to siRNA-transfection reagent treatment in contrast to siRNA-RVG-9R, which potently stimulated IL-6 secretion, confirming the immunologically inert profile of the exosome treatment. Given that exosomes encapsulate only 20% of siRNA, delivery with RVG-exosome appears to be more efficient than RVG-9R delivery as comparable mRNA knockdown and greater protein knockdown was achieved with fivefold less siRNA without the corresponding level of immune stimulation. This experiment demonstrated the therapeutic potential of RVG-exosome technology, which is potentially suited for long-term silencing of genes related to neurodegenerative diseases. The exosome delivery system of Alvarez-Erviti et al. may be applied to deliver the nucleic acid-targeting system of the present invention to therapeutic targets, especially neurodegenerative diseases. A dosage of about 100 to 1000 mg of nucleic acid-targeting system encapsulated in about 100 to 1000 mg of RVG exosomes may be contemplated for the present invention.

[0480] El-Andaloussi et al. (Nature Protocols 7, 2112-2126(2012)) provides exosomes derived from cultured cells harnessed for delivery of RNA in vitro and in vivo. This protocol first describes the generation of targeted exosomes through transfection of an expression vector, comprising an exosomal protein fused with a peptide ligand. Next, El-Andaloussi et al. explain how to purify and characterize exosomes from transfected cell supernatant. Next, El-Andaloussi et al. detail crucial steps for loading RNA into exosomes. Finally, El-Andaloussi et al. outline how to use exosomes to efficiently deliver RNA in vitro and in vivo in mouse brain. Examples of anticipated results in which exosome-mediated RNA delivery is evaluated by functional assays and imaging are also provided. The entire protocol takes ˜3 weeks. Delivery or administration according to the invention may be performed using exosomes produced from self-derived dendritic cells. From the herein teachings, this can be employed in the practice of the invention

[0481] In another embodiment, the plasma exosomes of Wahlgren et al. (Nucleic Acids Research, 2012, Vol. 40, No. 17 e130) are contemplated. Exosomes are nano-sized vesicles (30-90 nm in size) produced by many cell types, including dendritic cells (DC), B cells, T cells, mast cells, epithelial cells and tumor cells. These vesicles are formed by inward budding of late endosomes and are then released to the extracellular environment upon fusion with the plasma membrane. Because exosomes naturally carry RNA between cells, this property may be useful in gene therapy, and from this disclosure can be employed in the practice of the instant invention. Exosomes from plasma can be prepared by centrifugation of buffy coat at 900 g for 20 min to isolate the plasma followed by harvesting cell supernatants, centrifuging at 300 g for 10 min to eliminate cells and at 16 500 g for 30 min followed by filtration through a 0.22 mm filter. Exosomes are pelleted by ultracentrifugation at 120 000 g for 70 min. Chemical transfection of siRNA into exosomes is carried out according to the manufacturer's instructions in RNAi Human/Mouse Starter Kit (Quiagen, Hilden, Germany). siRNA is added to 100 ml PBS at a final concentration of 2 mmol/ml. After adding HiPerFect transfection reagent, the mixture is incubated for 10 min at RT. In order to remove the excess of micelles, the exosomes are re-isolated using aldehyde/sulfate latex beads. The chemical transfection of nucleic acid-targeting system into exosomes may be conducted similarly to siRNA. The exosomes may be co-cultured with monocytes and lymphocytes isolated from the peripheral blood of healthy donors. Therefore, it may be contemplated that exosomes containing nucleic acid-targeting system may be introduced to monocytes and lymphocytes of and autologously reintroduced into a human. Accordingly, delivery or administration according to the invention may be performed using plasma exosomes.

### Liposomes

[0482] Delivery or administration according to the invention can be performed with liposomes. Liposomes are spherical vesicle structures composed of a uni- or multilamellar lipid bilayer surrounding internal aqueous compartments and a relatively impermeable outer lipophilic phospholipid bilayer. Liposomes have gained considerable attention as drug delivery carriers because they are biocompatible, nontoxic, can deliver both hydrophilic and lipophilic drug molecules, protect their cargo from degradation by plasma enzymes, and transport their load across biological membranes and the blood brain barrier (BBB) (see, e.g., Spuch and Navarro, Journal of Drug Delivery, vol. 2011, Article ID 469679, 12 pages, 2011. doi:10.1155/2011/469679 for review). Liposomes can be made from several different types of lipids; however, phospholipids are most commonly used to generate liposomes as drug carriers. Although liposome formation is spontaneous when a lipid film is mixed with an aqueous solution, it can also be expedited by applying force in the form of shaking by using a homogenizer, sonicator, or an extrusion apparatus (see, e.g., Spuch and Navarro, Journal of Drug Delivery, vol. 2011, Article ID 469679, 12 pages, 2011. doi:10.1155/2011/469679 for review).

[0483] Several other additives may be added to liposomes in order to modify their structure and properties. For instance, either cholesterol or sphingomyelin may be added to the liposomal mixture in order to help stabilize the liposomal structure and to prevent the leakage of the liposomal inner cargo. Further, liposomes are prepared from hydrogenated egg phosphatidylcholine or egg phosphatidylcholine, cholesterol, and dicetyl phosphate, and their mean vesicle sizes were adjusted to about 50 and 100 nm. (see, e.g., Spuch and Navarro, Journal of Drug Delivery, vol. 2011, Article ID 469679, 12 pages, 2011. doi:10.1155/2011/469679 for review). A liposome formulation may be mainly comprised of natural phospholipids and lipids such as 1,2-distearoryl-sn-glycero-3-phosphatidyl choline (DSPC), sphingomyelin, egg phosphatidylcholines and monosialoganglioside. Since this formulation is made up of phospholipids only, liposomal formulations have encountered many challenges, one of the ones being the instability in plasma. Several attempts to overcome these challenges have been made, specifically in the manipulation of the lipid membrane. One of these attempts focused on the manipulation of cholesterol. Addition of cholesterol to conventional formulations reduces rapid release of the encapsulated bioactive compound into the plasma or 1,2-dioleoyl-sn-glycero-3-phosphoethanolamine (DOPE) increases the stability (see, e.g., Spuch and Navarro, Journal of Drug Delivery, vol. 2011, Article ID 469679, 12 pages, 2011. doi:10.1155/2011/469679 for review). In a particularly advantageous embodiment, Trojan Horse liposomes (also known as Molecular Trojan Horses) are desirable and protocols may be found at http://cshprotocols.cshop.org/content/2010/4/pdb.prot5407.long. These particles allow delivery of a transgene to the entire brain after an intravascular injection. Without being bound by limitation, it is believed that neutral lipid particles with specific antibodies conjugated to surface allow crossing of the blood brain barrier via endocytosis. Applicant postulates utilizing Trojan Horse Liposomes to deliver the CRISPR-Cas13b complexes to the brain via an intravascular injection, which would allow whole brain transgenic animals without the need for embryonic manipulation. About 1-5 g of DNA or RNA may be contemplated for in vivo administration in liposomes.

[0484] In another embodiment, the nucleic acid-targeting system or components thereof may be administered in liposomes, such as a stable nucleic-acid-lipid particle (SNALP) (see, e.g., Morrissey et al., Nature Biotechnology, Vol. 23, No. 8, August 2005). Daily intravenous injections of about 1, 3 or 5 mg/kg/day of a specific nucleic acid-targeting system targeted in a SNALP are contemplated. The daily treatment may be over about three days and then weekly for about five weeks. In another embodiment, a specific nucleic acid-targeting system encapsulated SNALP) administered by intravenous injection to at doses of about 1 or 2.5 mg/kg are also contemplated (see, e.g., Zimmerman et al., Nature Letters, Vol. 441, 4 May 2006). The SNALP formulation may contain the lipids 3-N-[(wmethoxypoly(ethylene glycol) 2000) carbamoyl]-1,2-dimyristyloxy-propylamine (PEG-C-DMA), 1,2-dilinoleyloxy-N,N-dimethyl-3-aminopropane (DLinDMA), 1,2-distearoyl-sn-glycero-3-phosphocholine (DSPC) and cholesterol, in a 2:40:10:48 molar percent ratio (see, e.g., Zimmerman et al., Nature Letters, Vol. 441, 4 May 2006). In another embodiment, stable nucleic-acid-lipid particles (SNALPs) have proven to be effective delivery molecules to highly vascularized HepG2-derived liver tumors but not in poorly vascularized HCT-116 derived liver tumors (see, e.g., Li, Gene Therapy (2012) 19, 775-780). The SNALP liposomes may be prepared by formulating D-Lin-DMA and PEG-C-DMA with distearoylphosphatidylcholine (DSPC), Cholesterol and siRNA using a 25:1 lipid/siRNA ratio and a 48/40/10/2 molar ratio of Cholesterol/D-Lin-DMA/DSPC/PEG-C-DMA. The resulted SNALP liposomes are about 80-100 nm in size. In yet another embodiment, a SNALP may comprise synthetic cholesterol (Sigma-Aldrich, St Louis, Mo., USA), dipalmitoylphosphatidylcholine (Avanti Polar Lipids, Alabaster, Ala., USA), 3-N-[(w-methoxy poly(ethylene glycol)2000)carbamoyl]-1,2-dimyrestyloxypropylamine, and cationic 1,2-dilinoleyloxy-3-N,Ndimethylaminopropane (see, e.g., Geisbert et al., Lancet 2010; 375: 1896-905). A dosage of about 2 mg/kg total nucleic acid-targeting systemper dose administered as, for example, a bolus intravenous infusion may be contemplated. In yet another embodiment, a SNALP may comprise synthetic cholesterol (Sigma-Aldrich), 1,2-distearoyl-sn-glycero-3-phosphocholine (DSPC; Avanti Polar Lipids Inc.), PEG-cDMA, and 1,2-dilinoleyloxy-3-(N;N-dimethyl)aminopropane (DLinDMA) (see, e.g., Judge, J. Clin. Invest. 119:661-673 (2009)). Formulations used for in vivo studies may comprise a final lipid/RNA mass ratio of about 9:1.

[0485] The safety profile of RNAi nanomedicines has been reviewed by Barros and Gollob of Alnylam Pharmaceuticals (see, e.g., Advanced Drug Delivery Reviews 64 (2012) 1730-1737). The stable nucleic acid lipid particle (SNALP) is comprised of four different lipids—an ionizable lipid (DLinDMA) that is cationic at low pH, a neutral helper lipid, cholesterol, and a diffusible polyethylene glycol (PEG)-lipid. The particle is approximately 80 nm in diameter and is charge-neutral at physiologic pH. During formulation, the ionizable lipid serves to condense lipid with the anionic RNA during particle formation. When positively charged under increasingly acidic endosomal conditions, the ionizable lipid also mediates the fusion of SNALP with the endosomal membrane enabling release of RNA into the cytoplasm. The PEG-lipid stabilizes the particle and reduces aggregation during formulation, and subsequently provides a neutral hydrophilic exterior that improves pharmacokinetic properties. To date, two clinical programs have been initiated using SNALP formulations with RNA. Tekmira Pharmaceuticals recently completed a phase I single-dose study of SNALP-ApoB in adult volunteers with elevated LDL cholesterol. ApoB is predominantly expressed in the liver and jejunum and is essential for the assembly and secretion of VLDL and LDL. Seventeen subjects received a single dose of SNALP-ApoB (dose escalation across 7 dose levels). There was no evidence of liver toxicity (anticipated as the potential dose-limiting toxicity based on preclinical studies). One (of two) subjects at the highest dose experienced flu-like symptoms consistent with immune system stimulation, and the decision was made to conclude the trial. Alnylam Pharmaceuticals has similarly advanced ALN-TTR01, which employs the SNALP technology described above and targets hepatocyte production of both mutant and wild-type TTR to treat TTR amyloidosis (ATTR). Three ATTR syndromes have been described: familial amyloidotic polyneuropathy (FAP) and familial amyloidotic cardiomyopathy (FAC)—both caused by autosomal dominant mutations in TTR; and senile systemic amyloidosis (SSA) cause by wildtype TTR. A placebo-controlled, single dose-escalation phase I trial of ALN-TTR01 was recently completed in patients with ATTR. ALN-TTR01 was administered as a 15-minute IV infusion to 31 patients (23 with study drug and 8 with placebo) within a dose range of 0.01 to 1.0 mg/kg (based on siRNA). Treatment was well tolerated with no significant increases in liver function tests. Infusion-related reactions were noted in 3 of 23 patients at ≥0.4 mg/kg; all responded to slowing of the infusion rate and all continued on study. Minimal and transient elevations of serum cytokines IL-6, IP-10 and IL-lra were noted in two patients at the highest dose of 1 mg/kg (as anticipated from preclinical and NHP studies). Lowering of serum TTR, the expected pharmacodynamics effect of ALN-TTR01, was observed at 1 mg/kg.

[0486] In yet another embodiment, a SNALP may be made by solubilizing a cationic lipid, DSPC, cholesterol and PEG-lipid e.g., in ethanol, e.g., at a molar ratio of 40:10:40:10, respectively (see, Semple et al., Nature Niotechnology, Volume 28 Number 2 Feb. 2010, pp. 172-177). The lipid mixture was added to an aqueous buffer (50 mM citrate, pH 4) with mixing to a final ethanol and lipid concentration of 30% (vol/vol) and 6.1 mg/ml, respectively, and allowed to equilibrate at 22° C. for 2 min before extrusion. The hydrated lipids were extruded through two stacked 80 nm pore-sized filters (Nuclepore) at 22° C. using a Lipex Extruder (Northern Lipids) until a vesicle diameter of 70-90 nm, as determined by dynamic light scattering analysis, was obtained. This generally required 1-3 passes. The siRNA (solubilized in a 50 mM citrate, pH 4 aqueous solution containing 30% ethanol) was added to the pre-equilibrated (35° C.) vesicles at a rate of ˜5 ml/min with mixing. After a final target siRNA/lipid ratio of 0.06 (wt/wt) was reached, the mixture was incubated for a further 30 min at 35° C. to allow vesicle reorganization and encapsulation of the siRNA. The ethanol was then removed and the external buffer replaced with PBS (155 mM NaCl, 3 mM Na₂HPO₄, 1 mM KH₂PO₄, pH 7.5) by either dialysis or tangential flow diafiltration. siRNA were encapsulated in SNALP using a controlled step-wise dilution method process. The lipid constituents of KC2-SNALP were DLin-KC2-DMA (cationic lipid), dipalmitoylphosphatidylcholine (DPPC; Avanti Polar Lipids), synthetic cholesterol (Sigma) and PEG-C-DMA used at a molar ratio of 57.1:7.1:34.3:1.4. Upon formation of the loaded particles, SNALP were dialyzed against PBS and filter sterilized through a 0.2 μm filter before use. Mean particle sizes were 75-85 nm and 90-95% of the siRNA was encapsulated within the lipid particles. The final siRNA/lipid ratio in formulations used for in vivo testing was ˜0.15 (wt/wt). LNP-siRNA systems containing Factor VII siRNA were diluted to the appropriate concentrations in sterile PBS immediately before use and the formulations were administered intravenously through the lateral tail vein in a total volume of 10 ml/kg. This method and these delivery systems may be extrapolated to the nucleic acid-targeting system of the present invention.

### Other Lipids

[0487] Other cationic lipids, such as amino lipid 2,2-dilinoleyl-4-dimethylaminoethyl-[1,3]-dioxolane (DLin-KC2-DMA) may be utilized to encapsulate nucleic acid-targeting system or components thereof or nucleic acid molecule(s) coding therefor e.g., similar to SiRNA (see, e.g., Jayaraman, Angew. Chem. Int. Ed. 2012, 51, 8529-8533), and hence may be employed in the practice of the invention. A preformed vesicle with the following lipid composition may be contemplated: amino lipid, distearoylphosphatidylcholine (DSPC), cholesterol and (R)-2,3-bis(octadecyloxy) propyl-1-(methoxy poly(ethylene glycol)2000)propylcarbamate (PEG-lipid) in the molar ratio 40/10/40/10, respectively, and a FVII siRNA/total lipid ratio of approximately 0.05 (w/w). To ensure a narrow particle size distribution in the range of 70-90 nm and a low polydispersity index of 0.11+0.04 (n=56), the particles may be extruded up to three times through 80 nm membranes prior to adding the guide RNA. Particles containing the highly potent amino lipid 16 may be used, in which the molar ratio of the four lipid components 16, DSPC, cholesterol and PEG-lipid (50/10/38.5/1.5) which may be further optimized to enhance in vivo activity.

[0488] Michael S D Kormann et al. (“Expression of therapeutic proteins after delivery of chemically modified mRNA in mice: Nature Biotechnology, Volume:29, Pages: 154-157 (2011)) describes the use of lipid envelopes to deliver RNA. Use of lipid envelopes is also preferred in the present invention.

[0489] In another embodiment, lipids may be formulated with the RNA-targeting system (CRISPR-Cas13b complex, i.e., the Cas13b complexed with crRNA) of the present invention or component(s) thereof or nucleic acid molecule(s) coding therefor to form lipid nanoparticles (LNPs). Lipids include, but are not limited to, DLin-KC2-DMA4, C12-200 and colipids disteroylphosphatidyl choline, cholesterol, and PEG-DMG may be formulated with RNA-targeting system instead of siRNA (see, e.g., Novobrantseva, Molecular Therapy-Nucleic Acids (2012) 1, e4; doi:10.1038/mtna.2011.3) using a spontaneous vesicle formation procedure. The component molar ratio may be about 50/10/38.5/1.5 (DLin-KC2-DMA or C12-200/disteroylphosphatidyl choline/cholesterol/PEG-DMG). The final lipid:siRNA weight ratio may be ˜12:1 and 9:1 in the case of DLin-KC2-DMA and C12-200 lipid particles (LNPs), respectively. The formulations may have mean particle diameters of ˜80 nm with >90% entrapment efficiency. A 3 mg/kg dose may be contemplated. Tekmira has a portfolio of approximately 95 patent families, in the U.S. and abroad, that are directed to various aspects of LNPs and LNP formulations (see, e.g., U.S. Pat. Nos. 7,982,027; 7,799,565; 8,058,069; 8,283,333; 7,901,708; 7,745,651; 7,803,397; 8,101,741; 8,188,263; 7,915,399; 8,236,943 and 7,838,658 and European Pat. Nos 1766035; 1519714; 1781593 and 1664316), all of which may be used and/or adapted to the present invention.

[0490] The RNA-targeting system or components thereof or nucleic acid molecule(s) coding therefor may be delivered encapsulated in PLGA Microspheres such as that further described in US published applications 20130252281 and 20130245107 and 20130244279 (assigned to Moderna Therapeutics) which relate to aspects of formulation of compositions comprising modified nucleic acid molecules which may encode a protein, a protein precursor, or a partially or fully processed form of the protein or a protein precursor. The formulation may have a molar ratio 50:10:38.5:1.5-3.0 (cationic lipid:fusogenic lipid:cholesterol:PEG lipid). The PEG lipid may be selected from, but is not limited to PEG-c-DOMG, PEG-DMG. The fusogenic lipid may be DSPC. See also, Schrum et al., Delivery and Formulation of Engineered Nucleic Acids, US published application 20120251618.

[0491] Nanomerics' technology addresses bioavailability challenges for a broad range of therapeutics, including low molecular weight hydrophobic drugs, peptides, and nucleic acid based therapeutics (plasmid, siRNA, miRNA). Specific administration routes for which the technology has demonstrated clear advantages include the oral route, transport across the blood-brain-barrier, delivery to solid tumours, as well as to the eye. See, e.g., Mazza et al., 2013, ACS Nano. 2013 Feb. 26; 7(2):1016-26; Uchegbu and Siew, 2013, J Pharm Sci. 102(2):305-10 and Lalatsa et al., 2012, J Control Release. 2012 Jul. 20; 161(2):523-36.

[0492] US Patent Publication No. 20050019923 describes cationic dendrimers for delivering bioactive molecules, such as polynucleotide molecules, peptides and polypeptides and/or pharmaceutical agents, to a mammalian body. The dendrimers are suitable for targeting the delivery of the bioactive molecules to, for example, the liver, spleen, lung, kidney or heart (or even the brain). Dendrimers are synthetic 3-dimensional macromolecules that are prepared in a step-wise fashion from simple branched monomer units, the nature and functionality of which can be easily controlled and varied. Dendrimers are synthesized from the repeated addition of building blocks to a multifunctional core (divergent approach to synthesis), or towards a multifunctional core (convergent approach to synthesis) and each addition of a 3-dimensional shell of building blocks leads to the formation of a higher generation of the dendrimers. Polypropylenimine dendrimers start from a diaminobutane core to which is added twice the number of amino groups by a double Michael addition of acrylonitrile to the primary amines followed by the hydrogenation of the nitriles. This results in a doubling of the amino groups. Polypropylenimine dendrimers contain 100% protonable nitrogens and up to 64 terminal amino groups (generation 5, DAB 64). Protonable groups are usually amine groups which are able to accept protons at neutral pH. The use of dendrimers as gene delivery agents has largely focused on the use of the polyamidoamine. and phosphorous containing compounds with a mixture of amine/amide or N—P(O₂)S as the conjugating units respectively with no work being reported on the use of the lower generation polypropylenimine dendrimers for gene delivery. Polypropylenimine dendrimers have also been studied as pH sensitive controlled release systems for drug delivery and for their encapsulation of guest molecules when chemically modified by peripheral amino acid groups. The cytotoxicity and interaction of polypropylenimine dendrimers with DNA as well as the transfection efficacy of DAB 64 has also been studied. US Patent Publication No. 20050019923 is based upon the observation that, contrary to earlier reports, cationic dendrimers, such as polypropylenimine dendrimers, display suitable properties, such as specific targeting and low toxicity, for use in the targeted delivery of bioactive molecules, such as genetic material. In addition, derivatives of the cationic dendrimer also display suitable properties for the targeted delivery of bioactive molecules. See also, Bioactive Polymers, US published application 20080267903, which discloses “Various polymers, including cationic polyamine polymers and dendrimeric polymers, are shown to possess anti-proliferative activity, and may therefore be useful for treatment of disorders characterised by undesirable cellular proliferation such as neoplasms and tumours, inflammatory disorders (including autoimmune disorders), psoriasis and atherosclerosis. The polymers may be used alone as active agents, or as delivery vehicles for other therapeutic agents, such as drug molecules or nucleic acids for gene therapy. In such cases, the polymers' own intrinsic anti-tumour activity may complement the activity of the agent to be delivered.” The disclosures of these patent publications may be employed in conjunction with herein teachings for delivery of nucleic acid-targetingsystem(s) or component(s) thereof or nucleic acid molecule(s) coding therefor.

### Supercharged Proteins

[0493] Supercharged proteins are a class of engineered or naturally occurring proteins with unusually high positive or negative net theoretical charge and may be employed in delivery of nucleic acid-targetingsystem(s) or component(s) thereof or nucleic acid molecule(s) coding therefor. Both supernegatively and superpositively charged proteins exhibit a remarkable ability to withstand thermally or chemically induced aggregation. Superpositively charged proteins are also able to penetrate mammalian cells. Associating cargo with these proteins, such as plasmid DNA, RNA, or other proteins, can enable the functional delivery of these macromolecules into mammalian cells both in vitro and in vivo. David Liu's lab reported the creation and characterization of supercharged proteins in 2007 (Lawrence et al., 2007, Journal of the American Chemical Society 129, 10110-10112).

[0494] The nonviral delivery of RNA and plasmid DNA into mammalian cells are valuable both for research and therapeutic applications (Akinc et al., 2010, Nat. Biotech. 26, 561-569). Purified +36 GFP protein (or other superpositively charged protein) is mixed with RNAs in the appropriate serum-free media and allowed to complex prior addition to cells. Inclusion of serum at this stage inhibits formation of the supercharged protein-RNA complexes and reduces the effectiveness of the treatment. The following protocol has been found to be effective for a variety of cell lines (McNaughton et al., 2009, Proc. Natl. Acad. Sci. USA 106, 6111-6116). However, pilot experiments varying the dose of protein and RNA should be performed to optimize the procedure for specific cell lines. (1) One day before treatment, plate 1×10⁵ cells per well in a 48-well plate. (2) On the day of treatment, dilute purified +36 GFP protein in serumfree media to a final concentration 200 nM. Add RNA to a final concentration of 50 nM. Vortex to mix and incubate at room temperature for 10 min. (3) During incubation, aspirate media from cells and wash once with PBS. (4) Following incubation of +36 GFP and RNA, add the protein-RNA complexes to cells. (5) Incubate cells with complexes at 37° C. for 4h. (6) Following incubation, aspirate the media and wash three times with 20 U/mL heparin PBS. Incubate cells with serum-containing media for a further 48h or longer depending upon the assay for activity. (7) Analyze cells by immunoblot, qPCR, phenotypic assay, or other appropriate method.

[0495] +36 GFP was found to be an effective plasmid delivery reagent in a range of cells. See also, e.g., McNaughton et al., Proc. Natl. Acad. Sci. USA 106, 6111-6116 (2009); Cronican et al., ACS Chemical Biology 5, 747-752 (2010); Cronican et al., Chemistry & Biology 18, 833-838 (2011); Thompson et al., Methods in Enzymology 503, 293-319 (2012); Thompson, D. B., et al., Chemistry & Biology 19 (7), 831-843 (2012). The methods of the super charged proteins may be used and/or adapted for delivery of the RNA-targeting system(s) or component(s) thereof or nucleic acid molecule(s) coding therefor of the invention.

### Cell Penetrating Peptides (CPPs)

[0496] In yet another embodiment, cell penetrating peptides (CPPs) are contemplated for the delivery of the CRISPR Cas system. CPPs are short peptides that facilitate cellular uptake of various molecular cargo (from nanosize particles to small chemical molecules and large fragments of DNA). The term “cargo” as used herein includes but is not limited to the group consisting of therapeutic agents, diagnostic probes, peptides, nucleic acids, antisense oligonucleotides, plasmids, proteins, particles including nanoparticles, liposomes, chromophores, small molecules and radioactive materials. In aspects of the invention, the cargo may also comprise any component of the CRISPR Cas system or the entire functional CRISPR Cas system. Aspects of the present invention further provide methods for delivering a desired cargo into a subject comprising: (a) preparing a complex comprising the cell penetrating peptide of the present invention and a desired cargo, and (b) orally, intraarticularly, intraperitoneally, intrathecally, intrarterially, intranasally, intraparenchymally, subcutaneously, intramuscularly, intravenously, dermally, intrarectally, or topically administering the complex to a subject. The cargo is associated with the peptides either through chemical linkage via covalent bonds or through non-covalent interactions. The function of the CPPs are to deliver the cargo into cells, a process that commonly occurs through endocytosis with the cargo delivered to the endosomes of living mammalian cells. Cell-penetrating peptides are of different sizes, amino acid sequences, and charges but all CPPs have one distinct characteristic, which is the ability to translocate the plasma membrane and facilitate the delivery of various molecular cargoes to the cytoplasm or an organelle. CPP translocation may be classified into three main entry mechanisms: direct penetration in the membrane, endocytosis-mediated entry, and translocation through the formation of a transitory structure. CPPs have found numerous applications in medicine as drug delivery agents in the treatment of different diseases including cancer and virus inhibitors, as well as contrast agents for cell labeling. Examples of the latter include acting as a carrier for GFP, MM contrast agents, or quantum dots. CPPs hold great potential as in vitro and in vivo delivery vectors for use in research and medicine. CPPs typically have an amino acid composition that either contains a high relative abundance of positively charged amino acids such as lysine or arginine or has sequences that contain an alternating pattern of polar/charged amino acids and non-polar, hydrophobic amino acids. These two types of structures are referred to as polycationic or amphipathic, respectively. A third class of CPPs are the hydrophobic peptides, containing only apolar residues, with low net charge or have hydrophobic amino acid groups that are crucial for cellular uptake. One of the initial CPPs discovered was the trans-activating transcriptional activator (Tat) from Human Immunodeficiency Virus 1 (HIV-1) which was found to be efficiently taken up from the surrounding media by numerous cell types in culture. Since then, the number of known CPPs has expanded considerably and small molecule synthetic analogues with more effective protein transduction properties have been generated. CPPs include but are not limited to Penetratin, Tat (48-60), Transportan, and (R-AhX-R4) (Ahx=aminohexanoyl).

[0497] U.S. Pat. No. 8,372,951, provides a CPP derived from eosinophil cationic protein (ECP) which exhibits highly cell-penetrating efficiency and low toxicity. Aspects of delivering the CPP with its cargo into a vertebrate subject are also provided. Further aspects of CPPs and their delivery are described in U.S. Pat. Nos. 8,575,305; 8; 614,194 and 8,044,019. CPPs can be used to deliver the CRISPR-Cas system or components thereof. That CPPs can be employed to deliver the CRISPR-Cas system or components thereof is also provided in the manuscript “Gene disruption by cell-penetrating peptide-mediated delivery of Cas9 protein and guide RNA”, by Suresh Ramakrishna, Abu-Bonsrah Kwaku Dad, Jagadish Beloor, et al. Genome Res. 2014 Apr. 2. [Epub ahead of print], incorporated by reference in its entirety, wherein it is demonstrated that treatment with CPP-conjugated recombinant Cas9 protein and CPP-complexed guide RNAs lead to endogenous gene disruptions in human cell lines. In the paper the Cas9 protein was conjugated to CPP via a thioether bond, whereas the guide RNA was complexed with CPP, forming condensed, positively charged particles. It was shown that simultaneous and sequential treatment of human cells, including embryonic stem cells, dermal fibroblasts, HEK293T cells, HeLa cells, and embryonic carcinoma cells, with the modified Cas9 and guide RNA led to efficient gene disruptions with reduced off-target mutations relative to plasmid transfections. CPP delivery can be used in the practice of the invention.

### Implantable Devices

[0498] In another embodiment, implantable devices are also contemplated for delivery of the nucleic acid-targeting system or component(s) thereof or nucleic acid molecule(s) coding therefor. For example, US Patent Publication 20110195123 discloses an implantable medical device which elutes a drug locally and in prolonged period is provided, including several types of such a device, the treatment modes of implementation and methods of implantation. The device comprising of polymeric substrate, such as a matrix for example, that is used as the device body, and drugs, and in some cases additional scaffolding materials, such as metals or additional polymers, and materials to enhance visibility and imaging. An implantable delivery device can be advantageous in providing release locally and over a prolonged period, where drug is released directly to the extracellular matrix (ECM) of the diseased area such as tumor, inflammation, degeneration or for symptomatic objectives, or to injured smooth muscle cells, or for prevention. One kind of drug is RNA, as disclosed above, and this system may be used/and or adapted to the nucleic acid-targeting system of the present invention. The modes of implantation in some embodiments are existing implantation procedures that are developed and used today for other treatments, including brachytherapy and needle biopsy. In such cases the dimensions of the new implant described in this invention are similar to the original implant. Typically a few devices are implanted during the same treatment procedure.

[0499] US Patent Publication 20110195123, provides a drug delivery implantable or insertable system, including systems applicable to a cavity such as the abdominal cavity and/or any other type of administration in which the drug delivery system is not anchored or attached, comprising a biostable and/or degradable and/or bioabsorbable polymeric substrate, which may for example optionally be a matrix. It should be noted that the term “insertion” also includes implantation. The drug delivery system is preferably implemented as a “Loder” as described in US Patent Publication 20110195123.

[0500] The polymer or plurality of polymers are biocompatible, incorporating an agent and/or plurality of agents, enabling the release of agent at a controlled rate, wherein the total volume of the polymeric substrate, such as a matrix for example, in some embodiments is optionally and preferably no greater than a maximum volume that permits a therapeutic level of the agent to be reached. As a non-limiting example, such a volume is preferably within the range of 0.1 m³ to 1000 mm³, as required by the volume for the agent load. The Loder may optionally be larger, for example when incorporated with a device whose size is determined by functionality, for example and without limitation, a knee joint, an intra-uterine or cervical ring and the like.

[0501] The drug delivery system (for delivering the composition) is designed in some embodiments to preferably employ degradable polymers, wherein the main release mechanism is bulk erosion; or in some embodiments, non degradable, or slowly degraded polymers are used, wherein the main release mechanism is diffusion rather than bulk erosion, so that the outer part functions as membrane, and its internal part functions as a drug reservoir, which practically is not affected by the surroundings for an extended period (for example from about a week to about a few months). Combinations of different polymers with different release mechanisms may also optionally be used. The concentration gradient at the surface is preferably maintained effectively constant during a significant period of the total drug releasing period, and therefore the diffusion rate is effectively constant (termed “zero mode” diffusion). By the term “constant” it is meant a diffusion rate that is preferably maintained above the lower threshold of therapeutic effectiveness, but which may still optionally feature an initial burst and/or may fluctuate, for example increasing and decreasing to a certain degree. The diffusion rate is preferably so maintained for a prolonged period, and it can be considered constant to a certain level to optimize the therapeutically effective period, for example the effective silencing period.

[0502] The drug delivery system optionally and preferably is designed to shield the nucleotide based therapeutic agent from degradation, whether chemical in nature or due to attack from enzymes and other factors in the body of the subject.

[0503] The drug delivery system of US Patent Publication 20110195123 is optionally associated with sensing and/or activation appliances that are operated at and/or after implantation of the device, by non and/or minimally invasive methods of activation and/or acceleration/deceleration, for example optionally including but not limited to thermal heating and cooling, laser beams, and ultrasonic, including focused ultrasound and/or RF (radiofrequency) methods or devices.

[0504] According to some embodiments of US Patent Publication 20110195123, the site for local delivery may optionally include target sites characterized by high abnormal proliferation of cells, and suppressed apoptosis, including tumors, active and or chronic inflammation and infection including autoimmune diseases states, degenerating tissue including muscle and nervous tissue, chronic pain, degenerative sites, and location of bone fractures and other wound locations for enhancement of regeneration of tissue, and injured cardiac, smooth and striated muscle.

[0505] The site for implantation of the composition, or target site, preferably features a radius, area and/or volume that is sufficiently small for targeted local delivery. For example, the target site optionally has a diameter in a range of from about 0.1 mm to about 5 cm.

[0506] The location of the target site is preferably selected for maximum therapeutic efficacy. For example, the composition of the drug delivery system (optionally with a device for implantation as described above) is optionally and preferably implanted within or in the proximity of a tumor environment, or the blood supply associated thereof.

[0507] For example the composition (optionally with the device) is optionally implanted within or in the proximity to pancreas, prostate, breast, liver, via the nipple, within the vascular system and so forth.

[0508] The target location is optionally selected from the group comprising, consisting essentially of, or consisting of (as non-limiting examples only, as optionally any site within the body may be suitable for implanting a Loder): 1. brain at degenerative sites like in Parkinson or Alzheimer disease at the basal ganglia, white and gray matter; 2. spine as in the case of amyotrophic lateral sclerosis (ALS); 3. uterine cervix to prevent HPV infection; 4. active and chronic inflammatory joints; 5. dermis as in the case of psoriasis; 6. sympathetic and sensoric nervous sites for analgesic effect; 7. Intra osseous implantation; 8. acute and chronic infection sites; 9. Intra vaginal; 10. Inner ear—auditory system, labyrinth of the inner ear, vestibular system; 11. Intra tracheal; 12. Intra-cardiac; coronary, epicardiac; 13. urinary bladder; 14. biliary system; 15. parenchymal tissue including and not limited to the kidney, liver, spleen; 16. lymph nodes; 17. salivary glands; 18. dental gums; 19. Intra-articular (into joints); 20. Intra-ocular; 21. Brain tissue; 22. Brain ventricles; 23. Cavities, including abdominal cavity (for example but without limitation, for ovary cancer); 24. Intra esophageal and 25. Intra rectal.

[0509] Optionally insertion of the system (for example a device containing the composition) is associated with injection of material to the ECM at the target site and the vicinity of that site to affect local pH and/or temperature and/or other biological factors affecting the diffusion of the drug and/or drug kinetics in the ECM, of the target site and the vicinity of such a site.

[0510] Optionally, according to some embodiments, the release of said agent could be associated with sensing and/or activation appliances that are operated prior and/or at and/or after insertion, by non and/or minimally invasive and/or else methods of activation and/or acceleration/deceleration, including laser beam, radiation, thermal heating and cooling, and ultrasonic, including focused ultrasound and/or RF (radiofrequency) methods or devices, and chemical activators.

[0511] According to other embodiments of US Patent Publication 20110195123, the drug preferably comprises a RNA, for example for localized cancer cases in breast, pancreas, brain, kidney, bladder, lung, and prostate as described below. Although exemplified with RNAi, many drugs are applicable to be encapsulated in Loder, and can be used in association with this invention, as long as such drugs can be encapsulated with the Loder substrate, such as a matrix for example, and this system may be used and/or adapted to deliver the nucleic acid-targeting system of the present invention.

[0512] As another example of a specific application, neuro and muscular degenerative diseases develop due to abnormal gene expression. Local delivery of RNAs may have therapeutic properties for interfering with such abnormal gene expression. Local delivery of anti apoptotic, anti inflammatory and anti degenerative drugs including small drugs and macromolecules may also optionally be therapeutic. In such cases the Loder is applied for prolonged release at constant rate and/or through a dedicated device that is implanted separately. All of this may be used and/or adapted to the nucleic acid-targeting system of the present invention.

[0513] As yet another example of a specific application, psychiatric and cognitive disorders are treated with gene modifiers. Gene knockdown is a treatment option. Loders locally delivering agents to central nervous system sites are therapeutic options for psychiatric and cognitive disorders including but not limited to psychosis, bi-polar diseases, neurotic disorders and behavioral maladies. The Loders could also deliver locally drugs including small drugs and macromolecules upon implantation at specific brain sites. All of this may be used and/or adapted to the nucleic acid-targeting system of the present invention.

[0514] As another example of a specific application, silencing of innate and/or adaptive immune mediators at local sites enables the prevention of organ transplant rejection. Local delivery of RNAs and immunomodulating reagents with the Loder implanted into the transplanted organ and/or the implanted site renders local immune suppression by repelling immune cells such as CD8 activated against the transplanted organ. All of this may be used/and or adapted to the nucleic acid-targeting system of the present invention.

[0515] As another example of a specific application, vascular growth factors including VEGFs and angiogenin and others are essential for neovascularization. Local delivery of the factors, peptides, peptidomimetics, or suppressing their repressors is an important therapeutic modality; silencing the repressors and local delivery of the factors, peptides, macromolecules and small drugs stimulating angiogenesis with the Loder is therapeutic for peripheral, systemic and cardiac vascular disease.

[0516] The method of insertion, such as implantation, may optionally already be used for other types of tissue implantation and/or for insertions and/or for sampling tissues, optionally without modifications, or alternatively optionally only with non-major modifications in such methods. Such methods optionally include but are not limited to brachytherapy methods, biopsy, endoscopy with and/or without ultrasound, such as ERCP, stereotactic methods into the brain tissue, Laparoscopy, including implantation with a laparoscope into joints, abdominal organs, the bladder wall and body cavities.

[0517] Implantable device technology herein discussed can be employed with herein teachings and hence by this disclosure and the knowledge in the art, CRISPR-Cas system or components thereof or nucleic acid molecules thereof or encoding or providing components may be delivered via an implantable device.

### Patient-Specific Screening Methods

[0518] A nucleic acid-targeting system that targets RNA, e.g., trinucleotide repeats can be used to screen patients or patent samples for the presence of such repeats. The repeats can be the target of the RNA of the nucleic acid-targeting system, and if there is binding thereto by the nucleic acid-targeting system, that binding can be detected, to thereby indicate that such a repeat is present. Thus, a nucleic acid-targeting system can be used to screen patients or patient samples for the presence of the repeat. The patient can then be administered suitable compound(s) to address the condition; or, can be administered a nucleic acid-targeting system to bind to and cause insertion, deletion or mutation and alleviate the condition.

[0519] The invention uses nucleic acids to bind target RNA sequences.

CRISPR Effector Protein mRNA and Guide RNA

[0520] CRISPR effector (Cas13b) protein or mRNA therefor (or more generally a nucleuic acid molecule therefor) and guide RNA or crRNA might also be delivered separately e.g., the former 1-12 hours (preferably around 2-6 hours) prior to the administration of guide RNA or crRNA, or together. A second booster dose of guide RNA or crRNA can be administered 1-12 hours (preferably around 2-6 hours) after the initial administration.

[0521] The Cas13b effector protein is sometimes referred to herein as a CRISPR Enzyme. It will be appreciated that the effector protein is based on or derived from an enzyme, so the term ‘effector protein’ certainly includes ‘enzyme’ in some embodiments. However, it will also be appreciated that the effector protein may, as required in some embodiments, have DNA or RNA binding, but not necessarily cutting or nicking, activity, including a dead-Cas effector protein function.

[0522] Cellular targets include Hemopoietic Stem/Progenitor Cells (CD34+); Human T cells; and Eye (retinal cells)—for example photoreceptor precursor cells.

[0523] Inventive methods can further comprise delivery of templates. Delivery of templates may be via the cotemporaneous or separate from delivery of any or all the CRISPR effector protein (Cas13b) or guide or crRNA and via the same delivery mechanism or different. Inducible Systems

[0524] In some embodiments, a CRISPR effector (Cas 13b) protein may form a component of an inducible system. The inducible nature of the system would allow for spatiotemporal control of gene editing or gene expression using a form of energy. The form of energy may include but is not limited to electromagnetic radiation, sound energy, chemical energy and thermal energy. Examples of inducible system include tetracycline inducible promoters (Tet-On or Tet-Off), small molecule two-hybrid transcription activations systems (FKBP, ABA, etc), or light inducible systems (Phytochrome, LOV domains, or cryptochrome). In one embodiment, the CRISPR effector protein may be a part of a Light Inducible Transcriptional Effector (LITE) to direct changes in transcriptional activity in a sequence-specific manner. The components of a light may include a CRISPR effector protein, a light-responsive cytochrome heterodimer (e.g. from Arabidopsis thaliana), and a transcriptional activation/repression domain. Further examples of inducible DNA binding proteins and methods for their use are provided in U.S. 61/736,465 and U.S. 61/721,283, and WO 2014018423 A2 which is hereby incorporated by reference in its entirety.

### Self-Inactivating Systems

[0525] Once all copies of RNA in a cell have been edited, continued Cas13b effector protein expression or activity in that cell is no longer necessary. A Self-Inactivating system that relies on the use of RNA as to the Cas13b or crRNA as the guide target sequence can shut down the system by preventing expression of Cas13b or complex formation.

### Kits

[0526] In one aspect, the invention provides kits containing any one or more of the elements disclosed in the above methods and compositions. In some embodiments, the kit comprises a vector system as taught herein or one or more of the components of the CRISPR/Cas13b system or complex as taught herein, such as crRNAs and/or Cas13b effector protein or Cas13b effector protein encoding mRNA, and instructions for using the kit. Elements may be provide individually or in combinations, and may be provided in any suitable container, such as a vial, a bottle, or a tube. In some embodiments, the kit includes instructions in one or more languages, for example in more than one language. The instructions may be specific to the applications and methods described herein. In some embodiments, a kit comprises one or more reagents for use in a process utilizing one or more of the elements described herein. Reagents may be provided in any suitable container. For example, a kit may provide one or more reaction or storage buffers. Reagents may be provided in a form that is usable in a particular assay, or in a form that requires addition of one or more other components before use (e.g., in concentrate or lyophilized form). A buffer can be any buffer, including but not limited to a sodium carbonate buffer, a sodium bicarbonate buffer, a borate buffer, a Tris buffer, a MOPS buffer, a HEPES buffer, and combinations thereof. In some embodiments, the buffer is alkaline. In some embodiments, the buffer has a pH from about 7 to about 10. In some embodiments, the kit comprises one or more oligonucleotides corresponding to a guide sequence for insertion into a vector so as to operably link the guide or crRNA sequence and a regulatory element. In some embodiments, the kit comprises a homologous recombination template polynucleotide. In some embodiments, the kit comprises one or more of the vectors and/or one or more of the polynucleotides described herein. The kit may advantageously allows to provide all elements of the systems of the invention.

[0527] The invention has a broad spectrum of applications in, e.g., gene therapy, drug screening, disease diagnosis, and prognosis.

[0528] The terms “polynucleotide”, “nucleotide”, “nucleotide sequence”, “nucleic acid” and “oligonucleotide” are used interchangeably. They refer to a polymeric form of nucleotides of any length, either deoxyribonucleotides or ribonucleotides, or analogs thereof. Polynucleotides may have any three dimensional structure, and may perform any function, known or unknown. The following are non-limiting examples of polynucleotides: coding or non-coding regions of a gene or gene fragment, loci (locus) defined from linkage analysis, exons, introns, messenger RNA (mRNA), transfer RNA, ribosomal RNA, short interfering RNA (siRNA), short-hairpin RNA (shRNA), micro-RNA (miRNA), ribozymes, cDNA, recombinant polynucleotides, branched polynucleotides, plasmids, vectors, isolated DNA of any sequence, isolated RNA of any sequence, nucleic acid probes, and primers. The term also encompasses nucleic-acid-like structures with synthetic backbones, see, e.g., Eckstein, 1991; Baserga et al., 1992; Milligan, 1993; WO 97/03211; WO 96/39154; Mata, 1997; Strauss-Soukup, 1997; and Samstag, 1996. A polynucleotide may comprise one or more modified nucleotides, such as methylated nucleotides and nucleotide analogs. If present, modifications to the nucleotide structure may be imparted before or after assembly of the polymer. The sequence of nucleotides may be interrupted by non-nucleotide components. A polynucleotide may be further modified after polymerization, such as by conjugation with a labeling component. As used herein the term “wild type” is a term of the art understood by skilled persons and means the typical form of an organism, strain, gene or characteristic as it occurs in nature as distinguished from mutant or variant forms. A “wild type” can be a base line. As used herein the term “variant” should be taken to mean the exhibition of qualities that have a pattern that deviates from what occurs in nature. The terms “non-naturally occurring” or “engineered” are used interchangeably and indicate the involvement of the hand of man. The terms, when referring to nucleic acid molecules or polypeptides mean that the nucleic acid molecule or the polypeptide is at least substantially free from at least one other component with which they are naturally associated in nature and as found in nature. “Complementarity” refers to the ability of a nucleic acid to form hydrogen bond(s) with another nucleic acid sequence by either traditional Watson-Crick base pairing or other non-traditional types. A percent complementarity indicates the percentage of residues in a nucleic acid molecule which can form hydrogen bonds (e.g., Watson-Crick base pairing) with a second nucleic acid sequence (e.g., 5, 6, 7, 8, 9, 10 out of 10 being 50%, 60%, 70%, 80%, 90%, and 100% complementary). “Perfectly complementary” means that all the contiguous residues of a nucleic acid sequence will hydrogen bond with the same number of contiguous residues in a second nucleic acid sequence. “Substantially complementary” as used herein refers to a degree of complementarity that is at least 60%, 65%, 70%, 75%, 80%, 85%, 90%, 95%, 97%, 98%, 99%, or 100% over a region of 8, 9, 10, 11, 12, 13, 14, 15, 16, 17, 18, 19, 20, 21, 22, 23, 24, 25, 30, 35, 40, 45, 50, or more nucleotides, or refers to two nucleic acids that hybridize under stringent conditions. As used herein, “stringent conditions” for hybridization refer to conditions under which a nucleic acid having complementarity to a target sequence predominantly hybridizes with the target sequence, and substantially does not hybridize to non-target sequences. Stringent conditions are generally sequence-dependent, and vary depending on a number of factors. In general, the longer the sequence, the higher the temperature at which the sequence specifically hybridizes to its target sequence. Non-limiting examples of stringent conditions are described in detail in Tijssen (1993), Laboratory Techniques In Biochemistry And Molecular Biology-Hybridization With Nucleic Acid Probes Part I, Second Chapter “Overview of principles of hybridization and the strategy of nucleic acid probe assay”, Elsevier, N.Y. Where reference is made to a polynucleotide sequence, then complementary or partially complementary sequences are also envisaged. These are preferably capable of hybridizing to the reference sequence under highly stringent conditions. Generally, in order to maximize the hybridization rate, relatively low-stringency hybridization conditions are selected: about 20 to 25° C. lower than the thermal melting point (Tₘ). The Tₘ is the temperature at which 50% of specific target sequence hybridizes to a perfectly complementary probe in solution at a defined ionic strength and pH. Generally, in order to require at least about 85% nucleotide complementarity of hybridized sequences, highly stringent washing conditions are selected to be about 5 to 15° C. lower than the Tₘ In order to require at least about 70% nucleotide complementarity of hybridized sequences, moderately-stringent washing conditions are selected to be about 15 to 30° C. lower than the Tₘ Highly permissive (very low stringency) washing conditions may be as low as 50° C. below the Tₘ, allowing a high level of mis-matching between hybridized sequences. Those skilled in the art will recognize that other physical and chemical parameters in the hybridization and wash stages can also be altered to affect the outcome of a detectable hybridization signal from a specific level of homology between target and probe sequences. Preferred highly stringent conditions comprise incubation in 50% formamide, 5×SSC, and 1% SDS at 42° C., or incubation in 5×SSC and 1% SDS at 65° C., with wash in 0.2×SSC and 0.1% SDS at 65° C. “Hybridization” refers to a reaction in which one or more polynucleotides react to form a complex that is stabilized via hydrogen bonding between the bases of the nucleotide residues. The hydrogen bonding may occur by Watson Crick base pairing, Hoogstein binding, or in any other sequence specific manner. The complex may comprise two strands forming a duplex structure, three or more strands forming a multi stranded complex, a single self-hybridizing strand, or any combination of these. A hybridization reaction may constitute a step in a more extensive process, such as the initiation of PCR, or the cleavage of a polynucleotide by an enzyme. A sequence capable of hybridizing with a given sequence is referred to as the “complement” of the given sequence. As used herein, the term “genomic locus” or “locus” (plural loci) is the specific location of a gene or DNA sequence on a chromosome. A “gene” refers to stretches of DNA or RNA that encode a polypeptide or an RNA chain that has functional role to play in an organism and hence is the molecular unit of heredity in living organisms. For the purpose of this invention it may be considered that genes include regions which regulate the production of the gene product, whether or not such regulatory sequences are adjacent to coding and/or transcribed sequences. Accordingly, a gene includes, but is not necessarily limited to, promoter sequences, terminators, translational regulatory sequences such as ribosome binding sites and internal ribosome entry sites, enhancers, silencers, insulators, boundary elements, replication origins, matrix attachment sites and locus control regions. As used herein, “expression of a genomic locus” or “gene expression” is the process by which information from a gene is used in the synthesis of a functional gene product. The products of gene expression are often proteins, but in non-protein coding genes such as rRNA genes or tRNA genes, the product is functional RNA. The process of gene expression is used by all known life—eukaryotes (including multicellular organisms), prokaryotes (bacteria and archaea) and viruses to generate functional products to survive. As used herein “expression” of a gene or nucleic acid encompasses not only cellular gene expression, but also the transcription and translation of nucleic acid(s) in cloning systems and in any other context. As used herein, “expression” also refers to the process by which a polynucleotide is transcribed from a DNA template (such as into and mRNA or other RNA transcript) and/or the process by which a transcribed mRNA is subsequently translated into peptides, polypeptides, or proteins. Transcripts and encoded polypeptides may be collectively referred to as “gene product.” If the polynucleotide is derived from genomic DNA, expression may include splicing of the mRNA in a eukaryotic cell. The terms “polypeptide”, “peptide” and “protein” are used interchangeably herein to refer to polymers of amino acids of any length. The polymer may be linear or branched, it may comprise modified amino acids, and it may be interrupted by non-amino acids. The terms also encompass an amino acid polymer that has been modified; for example, disulfide bond formation, glycosylation, lipidation, acetylation, phosphorylation, or any other manipulation, such as conjugation with a labeling component. As used herein the term “amino acid” includes natural and/or unnatural or synthetic amino acids, including glycine and both the D or L optical isomers, and amino acid analogs and peptidomimetics. As used herein, the term “domain” or “protein domain” refers to a part of a protein sequence that may exist and function independently of the rest of the protein chain. As described in aspects of the invention, sequence identity is related to sequence homology. Homology comparisons may be conducted by eye, or more usually, with the aid of readily available sequence comparison programs. These commercially available computer programs may calculate percent (%) homology between two or more sequences and may also calculate the sequence identity shared by two or more amino acid or nucleic acid sequences.

[0529] As used herein the term “wild type” is a term of the art understood by skilled persons and means the typical form of an organism, strain, gene or characteristic as it occurs in nature as distinguished from mutant or variant forms. A “wild type” can be a base line.

[0530] As used herein the term “variant” should be taken to mean the exhibition of qualities that have a pattern that deviates from what occurs in nature. The terms “non-naturally occurring” or “engineered” are used interchangeably and indicate the involvement of the hand of man. The terms, when referring to nucleic acid molecules or polypeptides mean that the nucleic acid molecule or the polypeptide is at least substantially free from at least one other component with which they are naturally associated in nature and as found in nature. In all aspects and embodiments, whether they include these terms or not, it will be understood that, preferably, the may be optional and thus preferably included or not preferably not included. Furthermore, the terms “non-naturally occurring” and “engineered” may be used interchangeably and so can therefore be used alone or in combination and one or other may replace mention of both together. In particular, “engineered” is preferred in place of “non-naturally occurring” or “non-naturally occurring and/or engineered.”

[0531] Sequence homologies may be generated by any of a number of computer programs known in the art, for example BLAST or FASTA, etc. A suitable computer program for carrying out such an alignment is the GCG Wisconsin Bestfit package (University of Wisconsin, U.S.A; Devereux et al., 1984, Nucleic Acids Research 12:387). Examples of other software than may perform sequence comparisons include, but are not limited to, the BLAST package (see Ausubel et al., 1999 ibid—Chapter 18), FASTA (Atschul et al., 1990, J. Mol. Biol., 403-410) and the GENEWORKS suite of comparison tools. Both BLAST and FASTA are available for offline and online searching (see Ausubel et al., 1999 ibid, pages 7-58 to 7-60). However it is preferred to use the GCG Bestfit program. Percentage (%) sequence homology may be calculated over contiguous sequences, i.e., one sequence is aligned with the other sequence and each amino acid or nucleotide in one sequence is directly compared with the corresponding amino acid or nucleotide in the other sequence, one residue at a time. This is called an “ungapped” alignment. Typically, such ungapped alignments are performed only over a relatively short number of residues. Although this is a very simple and consistent method, it fails to take into consideration that, for example, in an otherwise identical pair of sequences, one insertion or deletion may cause the following amino acid residues to be put out of alignment, thus potentially resulting in a large reduction in % homology when a global alignment is performed. Consequently, most sequence comparison methods are designed to produce optimal alignments that take into consideration possible insertions and deletions without unduly penalizing the overall homology or identity score. This is achieved by inserting “gaps” in the sequence alignment to try to maximize local homology or identity. However, these more complex methods assign “gap penalties” to each gap that occurs in the alignment so that, for the same number of identical amino acids, a sequence alignment with as few gaps as possible—reflecting higher relatedness between the two compared sequences—may achieve a higher score than one with many gaps. “Affinity gap costs” are typically used that charge a relatively high cost for the existence of a gap and a smaller penalty for each subsequent residue in the gap. This is the most commonly used gap scoring system. High gap penalties may, of course, produce optimized alignments with fewer gaps. Most alignment programs allow the gap penalties to be modified. However, it is preferred to use the default values when using such software for sequence comparisons. For example, when using the GCG Wisconsin Bestfit package the default gap penalty for amino acid sequences is −12 for a gap and −4 for each extension. Calculation of maximum % homology therefore first requires the production of an optimal alignment, taking into consideration gap penalties. A suitable computer program for carrying out such an alignment is the GCG Wisconsin Bestfit package (Devereux et al., 1984 Nuc. Acids Research 12 p387). Examples of other software than may perform sequence comparisons include, but are not limited to, the BLAST package (see Ausubel et al., 1999 Short Protocols in Molecular Biology, 4^{th} Ed. —Chapter 18), FASTA (Altschul et al., 1990 J. Mol. Biol. 403-410) and the GENEWORKS suite of comparison tools. Both BLAST and FASTA are available for offline and online searching (see Ausubel et al., 1999, Short Protocols in Molecular Biology, pages 7-58 to 7-60). However, for some applications, it is preferred to use the GCG Bestfit program. A new tool, called BLAST 2 Sequences is also available for comparing protein and nucleotide sequences (see FEMS Microbiol Lett. 1999 174(2): 247-50; FEMS Microbiol Lett. 1999 177(1): 187-8 and the website of the National Center for Biotechnology information at the website of the National Institutes for Health). Although the final % homology may be measured in terms of identity, the alignment process itself is typically not based on an all-or-nothing pair comparison. Instead, a scaled similarity score matrix is generally used that assigns scores to each pair-wise comparison based on chemical similarity or evolutionary distance. An example of such a matrix commonly used is the BLOSUM62 matrix—the default matrix for the BLAST suite of programs. GCG Wisconsin programs generally use either the public default values or a custom symbol comparison table, if supplied (see user manual for further details). For some applications, it is preferred to use the public default values for the GCG package, or in the case of other software, the default matrix, such as BLOSUM62. Alternatively, percentage homologies may be calculated using the multiple alignment feature in DNASIS™ (Hitachi Software), based on an algorithm, analogous to CLUSTAL (Higgins D G & Sharp P M (1988), Gene 73(1), 237-244). Once the software has produced an optimal alignment, it is possible to calculate % homology, preferably % sequence identity. The software typically does this as part of the sequence comparison and generates a numerical result. The sequences may also have deletions, insertions or substitutions of amino acid residues which produce a silent change and result in a functionally equivalent substance. Deliberate amino acid substitutions may be made on the basis of similarity in amino acid properties (such as polarity, charge, solubility, hydrophobicity, hydrophilicity, and/or the amphipathic nature of the residues) and it is therefore useful to group amino acids together in functional groups. Amino acids may be grouped together based on the properties of their side chains alone. However, it is more useful to include mutation data as well. The sets of amino acids thus derived are likely to be conserved for structural reasons. These sets may be described in the form of a Venn diagram (Livingstone C. D. and Barton G. J. (1993) “Protein sequence alignments: a strategy for the hierarchical analysis of residue conservation” Comput. Appl. Biosci. 9: 745-756) (Taylor W. R. (1986) “The classification of amino acid conservation” J. Theor. Biol. 119; 205-218). Conservative substitutions may be made, for example according to the table below which describes a generally accepted Venn diagram grouping of amino acids.

| Set | | Sub-set | |
|---|---|---|---|
| Hydro- | F W Y H K M I L V A | Aromatic | F W Y H |
| phobic | G C(SEQ ID NO: 132) | Aliphatic | I L V |
| Polar | W Y H K R E D C S T | Charged | H K R E D |
| | N Q | Positively | H K R |
| | (SEQ ID NO: 133) | charged | |
| | | Negatively | E D |
| | | charged | |
| Small | V C A G S P T N D | Tiny | A G S |
| | (SEQ ID NO: 134) | | |

[0532] The terms “subject,” “individual,” and “patient” are used interchangeably herein to refer to a vertebrate, preferably a mammal, more preferably a human. Mammals include, but are not limited to, murines, simians, humans, farm animals, sport animals, and pets. Tissues, cells and their progeny of a biological entity obtained in vivo or cultured in vitro are also encompassed.

[0533] The terms “therapeutic agent”, “therapeutic capable agent” or “treatment agent” are used interchangeably and refer to a molecule or compound that confers some beneficial effect upon administration to a subject. The beneficial effect includes enablement of diagnostic determinations; amelioration of a disease, symptom, disorder, or pathological condition; reducing or preventing the onset of a disease, symptom, disorder or condition; and generally counteracting a disease, symptom, disorder or pathological condition. As used herein, “treatment” or “treating,” or “palliating” or “ameliorating” are used interchangeably. These terms refer to an approach for obtaining beneficial or desired results including but not limited to a therapeutic benefit and/or a prophylactic benefit. By therapeutic benefit is meant any therapeutically relevant improvement in or effect on one or more diseases, conditions, or symptoms under treatment. For prophylactic benefit, the compositions may be administered to a subject at risk of developing a particular disease, condition, or symptom, or to a subject reporting one or more of the physiological symptoms of a disease, even though the disease, condition, or symptom may not have yet been manifested. The term “effective amount” or “therapeutically effective amount” refers to the amount of an agent that is sufficient to effect beneficial or desired results. The therapeutically effective amount may vary depending upon one or more of: the subject and disease condition being treated, the weight and age of the subject, the severity of the disease condition, the manner of administration and the like, which can readily be determined by one of ordinary skill in the art. The term also applies to a dose that will provide an image for detection by any one of the imaging methods described herein. The specific dose may vary depending on one or more of: the particular agent chosen, the dosing regimen to be followed, whether it is administered in combination with other compounds, timing of administration, the tissue to be imaged, and the physical delivery system in which it is carried.

[0534] The practice of the present invention employs, unless otherwise indicated, conventional techniques of immunology, biochemistry, chemistry, molecular biology, microbiology, cell biology, genomics and recombinant DNA, which are within the skill of the art. See Sambrook, Fritsch and Maniatis, MOLECULAR CLONING: A LABORATORY MANUAL, 2nd edition (1989); CURRENT PROTOCOLS IN MOLECULAR BIOLOGY (F. M. Ausubel, et al. eds., (1987)); the series METHODS IN ENZYMOLOGY (Academic Press, Inc.): PCR 2: A PRACTICAL APPROACH (M. J. MacPherson, B. D. Hames and G. R. Taylor eds. (1995)), Harlow and Lane, eds. (1988) ANTIBODIES, A LABORATORY MANUAL, and ANIMAL CELL CULTURE (R. I. Freshney, ed. (1987)). Several aspects of the invention relate to vector systems comprising one or more vectors, or vectors as such. Vectors can be designed for expression of CRISPR transcripts (e.g. nucleic acid transcripts, proteins, or enzymes) in prokaryotic or eukaryotic cells. For example, CRISPR transcripts can be expressed in bacterial cells such as Escherichia coli, insect cells (using baculovirus expression vectors), yeast cells, or mammalian cells. Suitable host cells are discussed further in Goeddel, GENE EXPRESSION TECHNOLOGY: METHODS IN ENZYMOLOGY 185, Academic Press, San Diego, Calif. (1990). Alternatively, the recombinant expression vector can be transcribed and translated in vitro, for example using T7 promoter regulatory sequences and T7 polymerase. Embodiments of the invention include sequences (both polynucleotide or polypeptide) which may comprise homologous substitution (substitution and replacement are both used herein to mean the interchange of an existing amino acid residue or nucleotide, with an alternative residue or nucleotide) that may occur i.e., like-for-like substitution in the case of amino acids such as basic for basic, acidic for acidic, polar for polar, etc. Non-homologous substitution may also occur i.e., from one class of residue to another or alternatively involving the inclusion of unnatural amino acids such as ornithine (hereinafter referred to as Z), diaminobutyric acid ornithine (hereinafter referred to as B), norleucine ornithine (hereinafter referred to as O), pyriylalanine, thienylalanine, naphthylalanine and phenylglycine. Variant amino acid sequences may include suitable spacer groups that may be inserted between any two amino acid residues of the sequence including alkyl groups such as methyl, ethyl or propyl groups in addition to amino acid spacers such as glycine or β-alanine residues. A further form of variation, which involves the presence of one or more amino acid residues in peptoid form, may be well understood by those skilled in the art. For the avoidance of doubt, “the peptoid form” is used to refer to variant amino acid residues wherein the α-carbon substituent group is on the residue's nitrogen atom rather than the α-carbon. Processes for preparing peptides in the peptoid form are known in the art, for example Simon R J et al., PNAS (1992) 89(20), 9367-9371 and Horwell D C, Trends Biotechnol. (1995) 13(4), 132-134. Homology modelling: Corresponding residues in other Cas13b orthologs can be identified by the methods of Zhang et al., 2012 (Nature; 490(7421): 556-60) and Chen et al., 2015 (PLoS Comput Biol; 11(5): e1004248)—a computational protein-protein interaction (PPI) method to predict interactions mediated by domain-motif interfaces. PrePPI (Predicting PPI), a structure based PPI prediction method, combines structural evidence with non-structural evidence using a Bayesian statistical framework. The method involves taking a pair a query proteins and using structural alignment to identify structural representatives that correspond to either their experimentally determined structures or homology models. Structural alignment is further used to identify both close and remote structural neighbors by considering global and local geometric relationships. Whenever two neighbors of the structural representatives form a complex reported in the Protein Data Bank, this defines a template for modelling the interaction between the two query proteins. Models of the complex are created by superimposing the representative structures on their corresponding structural neighbor in the template. This approach is further described in Dey et al., 2013 (Prot Sci; 22: 359-66).

[0535] For purpose of this invention, amplification means any method employing a primer and a polymerase capable of replicating a target sequence with reasonable fidelity. Amplification may be carried out by natural or recombinant DNA polymerases such as TaqGold™, T7 DNA polymerase, Klenow fragment of E. coli DNA polymerase, and reverse transcriptase. A preferred amplification method is PCR. In certain aspects the invention involves vectors. A used herein, a “vector” is a tool that allows or facilitates the transfer of an entity from one environment to another. It is a replicon, such as a plasmid, phage, or cosmid, into which another DNA segment may be inserted so as to bring about the replication of the inserted segment. Generally, a vector is capable of replication when associated with the proper control elements. In general, the term “vector” refers to a nucleic acid molecule capable of transporting another nucleic acid to which it has been linked. Vectors include, but are not limited to, nucleic acid molecules that are single-stranded, double-stranded, or partially double-stranded; nucleic acid molecules that comprise one or more free ends, no free ends (e.g., circular); nucleic acid molecules that comprise DNA, RNA, or both; and other varieties of polynucleotides known in the art. One type of vector is a “plasmid,” which refers to a circular double stranded DNA loop into which additional DNA segments can be inserted, such as by standard molecular cloning techniques. Another type of vector is a viral vector, wherein virally-derived DNA or RNA sequences are present in the vector for packaging into a virus (e.g., retroviruses, replication defective retroviruses, adenoviruses, replication defective adenoviruses, and adeno-associated viruses (AAVs)). Viral vectors also include polynucleotides carried by a virus for transfection into a host cell. Certain vectors are capable of autonomous replication in a host cell into which they are introduced (e.g., bacterial vectors having a bacterial origin of replication and episomal mammalian vectors). Other vectors (e.g., non-episomal mammalian vectors) are integrated into the genome of a host cell upon introduction into the host cell, and thereby are replicated along with the host genome. Moreover, certain vectors are capable of directing the expression of genes to which they are operatively-linked. Such vectors are referred to herein as “expression vectors.” Common expression vectors of utility in recombinant DNA techniques are often in the form of plasmids. Recombinant expression vectors can comprise a nucleic acid of the invention in a form suitable for expression of the nucleic acid in a host cell, which means that the recombinant expression vectors include one or more regulatory elements, which may be selected on the basis of the host cells to be used for expression, that is operatively-linked to the nucleic acid sequence to be expressed. Within a recombinant expression vector, “operably linked” is intended to mean that the nucleotide sequence of interest is linked to the regulatory element(s) in a manner that allows for expression of the nucleotide sequence (e.g., in an in vitro transcription/translation system or in a host cell when the vector is introduced into the host cell). With regards to recombination and cloning methods, mention is made of U.S. patent application Ser. No. 10/815,730, published Sep. 2, 2004 as US 2004-0171156 A1, the contents of which are herein incorporated by reference in their entirety. Aspects of the invention relate to bicistronic vectors for guide RNA and wild type, modified or mutated CRISPR effector proteins/enzymes (e.g. Cas13b effector proteins). Bicistronic expression vectors guide RNA and wild type, modified or mutated CRISPR effector proteins/enzymes (e.g. Cas13b effector proteins) are preferred. In general and particularly in this embodiment and wild type, modified or mutated CRISPR effector proteins/enzymes (e.g. Cas13b effector proteins) is preferably driven by the CBh promoter. The RNA may preferably be driven by a Pol III promoter, such as a U6 promoter. Ideally the two are combined.

[0536] In some embodiments, a loop in the guide RNA or crRNA is provided. This may be a stem loop or a tetra loop. The loop is preferably GAAA, but it is not limited to this sequence or indeed to being only 4 bp in length. Indeed, preferred loop forming sequences for use in hairpin structures are four nucleotides in length, and most preferably have the sequence GAAA. However, longer or shorter loop sequences may be used, as may alternative sequences. The sequences preferably include a nucleotide triplet (for example, AAA), and an additional nucleotide (for example C or G). Examples of loop forming sequences include CAAA and AAAG.

[0537] In practicing any of the methods disclosed herein, a suitable vector can be introduced to a cell or an embryo via one or more methods known in the art, including without limitation, microinjection, electroporation, sonoporation, biolistics, calcium phosphate-mediated transfection, cationic transfection, liposome transfection, dendrimer transfection, heat shock transfection, nucleofection transfection, magnetofection, lipofection, impalefection, optical transfection, proprietary agent-enhanced uptake of nucleic acids, and delivery via liposomes, immunoliposomes, virosomes, or artificial virions. In some methods, the vector is introduced into an embryo by microinjection. The vector or vectors may be microinjected into the nucleus or the cytoplasm of the embryo. In some methods, the vector or vectors may be introduced into a cell by nucleofection.

[0538] Vectors can be designed for expression of CRISPR transcripts (e.g., nucleic acid transcripts, proteins, or enzymes) in prokaryotic or eukaryotic cells. For example, CRISPR transcripts can be expressed in bacterial cells such as Escherichia coli, insect cells (using baculovirus expression vectors), yeast cells, or mammalian cells. Suitable host cells are discussed further in Goeddel, GENE EXPRESSION TECHNOLOGY: METHODS IN ENZYMOLOGY 185, Academic Press, San Diego, Calif. (1990). Alternatively, the recombinant expression vector can be transcribed and translated in vitro, for example using T7 promoter regulatory sequences and T7 polymerase.

[0539] Vectors may be introduced and propagated in a prokaryote or prokaryotic cell. In some embodiments, a prokaryote is used to amplify copies of a vector to be introduced into a eukaryotic cell or as an intermediate vector in the production of a vector to be introduced into a eukaryotic cell (e.g., amplifying a plasmid as part of a viral vector packaging system). In some embodiments, a prokaryote is used to amplify copies of a vector and express one or more nucleic acids, such as to provide a source of one or more proteins for delivery to a host cell or host organism. Expression of proteins in prokaryotes is most often carried out in Escherichia coli with vectors containing constitutive or inducible promoters directing the expression of either fusion or non-fusion proteins. Fusion vectors add a number of amino acids to a protein encoded therein, such as to the amino terminus of the recombinant protein. Such fusion vectors may serve one or more purposes, such as: (i) to increase expression of recombinant protein; (ii) to increase the solubility of the recombinant protein; and (iii) to aid in the purification of the recombinant protein by acting as a ligand in affinity purification. Often, in fusion expression vectors, a proteolytic cleavage site is introduced at the junction of the fusion moiety and the recombinant protein to enable separation of the recombinant protein from the fusion moiety subsequent to purification of the fusion protein. Such enzymes, and their cognate recognition sequences, include Factor Xa, thrombin and enterokinase. Example fusion expression vectors include pGEX (Pharmacia Biotech Inc; Smith and Johnson, 1988. Gene 67: 31-40), pMAL (New England Biolabs, Beverly, Mass.) and pRIT5 (Pharmacia, Piscataway, N.J.) that fuse glutathione S-transferase (GST), maltose E binding protein, or protein A, respectively, to the target recombinant protein. Examples of suitable inducible non-fusion E. coli expression vectors include pTrc (Amrann et al., (1988) Gene 69:301-315) and pET 11d (Studier et al., GENE EXPRESSION TECHNOLOGY: METHODS IN ENZYMOLOGY 185, Academic Press, San Diego, Calif. (1990) 60-89). In some embodiments, a vector is a yeast expression vector. Examples of vectors for expression in yeast Saccharomyces cerivisae include pYepSecl (Baldari, et al., 1987. EMBO J. 6: 229-234), pMFa (Kuijan and Herskowitz, 1982. Cell 30: 933-943), pJRY88 (Schultz et al., 1987. Gene 54: 113-123), pYES2 (Invitrogen Corporation, San Diego, Calif.), and picZ (InVitrogen Corp, San Diego, Calif.). In some embodiments, a vector drives protein expression in insect cells using baculovirus expression vectors. Baculovirus vectors available for expression of proteins in cultured insect cells (e.g., SF9 cells) include the pAc series (Smith, et al., 1983. Mol. Cell. Biol. 3: 2156-2165) and the pVL series (Lucklow and Summers, 1989. Virology 170: 31-39). In some embodiments, a vector is capable of driving expression of one or more sequences in mammalian cells using a mammalian expression vector. Examples of mammalian expression vectors include pCDM8 (Seed, 1987. Nature 329: 840) and pMT2PC (Kaufman, et al., 1987. EMBO 1 6: 187-195). When used in mammalian cells, the expression vector's control functions are typically provided by one or more regulatory elements. For example, commonly used promoters are derived from polyoma, adenovirus 2, cytomegalovirus, simian virus 40, and others disclosed herein and known in the art. For other suitable expression systems for both prokaryotic and eukaryotic cells see, e.g., Chapters 16 and 17 of Sambrook, et al., MOLECULAR CLONING: A LABORATORY MANUAL. 2nd ed., Cold Spring Harbor Laboratory, Cold Spring Harbor Laboratory Press, Cold Spring Harbor, N.Y., 1989. In some embodiments, the recombinant mammalian expression vector is capable of directing expression of the nucleic acid preferentially in a particular cell type (e.g., tissue-specific regulatory elements are used to express the nucleic acid). Tissue-specific regulatory elements are known in the art. Non-limiting examples of suitable tissue-specific promoters include the albumin promoter (liver-specific; Pinkert, et al., 1987. Genes Dev. 1: 268-277), lymphoid-specific promoters (Calame and Eaton, 1988. Adv. Immunol. 43: 235-275), in particular promoters of T cell receptors (Winoto and Baltimore, 1989. EMBO J. 8: 729-733) and immunoglobulins (Baneiji, et al., 1983. Cell 33: 729-740; Queen and Baltimore, 1983. Cell 33: 741-748), neuron-specific promoters (e.g., the neurofilament promoter; Byrne and Ruddle, 1989. Proc. Natl. Acad. Sci. USA 86: 5473-5477), pancreas-specific promoters (Edlund, et al., 1985. Science 230: 912-916), and mammary gland-specific promoters (e.g., milk whey promoter; U.S. Pat. No. 4,873,316 and European Application Publication No. 264,166). Developmentally-regulated promoters are also encompassed, e.g., the murine hox promoters (Kessel and Gruss, 1990. Science 249: 374-379) and the α-fetoprotein promoter (Campes and Tilghman, 1989. Genes Dev. 3: 537-546). With regards to these prokaryotic and eukaryotic vectors, mention is made of U.S. Pat. No. 6,750,059, the contents of which are incorporated by reference herein in their entirety. Other embodiments of the invention may relate to the use of viral vectors, with regards to which mention is made of U.S. patent application Ser. No. 13/092,085, the contents of which are incorporated by reference herein in their entirety. Tissue-specific regulatory elements are known in the art and in this regard, mention is made of U.S. Pat. No. 7,776,321, the contents of which are incorporated by reference herein in their entirety.

[0540] In some embodiments, a regulatory element is operably linked to one or more elements of or encoding a CRISPR Cas13b system or complex so as to drive expression of the one or more elements of the CRISPR system. In general, CRISPRs (Clustered Regularly Interspaced Short Palindromic Repeats), also known as SPIDRs (SPacer Interspersed Direct Repeats), constitute a family of DNA loci that are usually specific to a particular bacterial species. The CRISPR locus comprises a distinct class of interspersed short sequence repeats (SSRs) that were recognized in E. coli (Ishino et al., J. Bacteriol., 169:5429-5433 [1987]; and Nakata et al., J. Bacteriol., 171:3553-3556 [1989]), and associated genes. Similar interspersed SSRs have been identified in Haloferax mediterranei, Streptococcus pyogenes, Anabaena, and Mycobacterium tuberculosis (See, Groenen et al., Mol. Microbiol., 10:1057-1065 [1993]; Hoe et al., Emerg. Infect. Dis., 5:254-263 [1999]; Masepohl et al., Biochim. Biophys. Acta 1307:26-30 [1996]; and Mojica et al., Mol. Microbiol., 17:85-93 [1995]). The CRISPR loci typically differ from other SSRs by the structure of the repeats, which have been termed short regularly spaced repeats (SRSRs) (Janssen et al., OMICS J. Integ. Biol., 6:23-33 [2002]; and Mojica et al., Mol. Microbiol., 36:244-246 [2000]). In general, the repeats are short elements that occur in clusters that are regularly spaced by unique intervening sequences with a substantially constant length (Mojica et al., [2000], supra). Although the repeat sequences are highly conserved between strains, the number of interspersed repeats and the sequences of the spacer regions typically differ from strain to strain (van Embden et al., J. Bacteriol., 182:2393-2401 [2000]). CRISPR loci have been identified in more than 40 prokaryotes (See e.g., Jansen et al., Mol. Microbiol., 43:1565-1575 [2002]; and Mojica et al., [2005]) including, but not limited to Aeropyrum, Pyrobaculum, Sulfolobus, Archaeoglobus, Halocarcula, Methanobacterium, Methanococcus, Methanosarcina, Methanopyrus, Pyrococcus, Picrophilus, Thermoplasma, Corynebacterium, Mycobacterium, Streptomyces, Aquifex, Porphyromonas, Chlorobium, Thermus, Bacillus, Listeria, Staphylococcus, Clostridium, Thermoanaerobacter, Mycoplasma, Fusobacterium, Azarcus, Chromobacterium, Neisseria, Nitrosomonas, Desulfovibrio, Geobacter, Myxococcus, Campylobacter, Wolinella, Acinetobacter, Erwinia, Escherichia, Legionella, Methylococcus, Pasteurella, Photobacterium, Salmonella, Xanthomonas, Yersinia, Treponema, and Thermotoga.

[0541] In general, “RNA-targeting system” as used in the present application refers collectively to transcripts and other elements involved in the expression of or directing the activity of RNA-targeting CRISPR-associated 13b (“Cas13b”) genes (also referred to herein as an effector protein), including sequences encoding a RNA-targeting Cas (effector) protein and a guide RNA (or crRNA sequence), with reference to FIG. 1 as herein discussed. In general, a RNA-targeting system is characterized by elements that promote the formation of a RNA-targeting complex at the site of a target sequence. In the context of formation of a RNA-targeting complex, “target sequence” refers to a RNA sequence to which a guide sequence (or the guide or of the crRNA) is designed to have complementarity, where hybridization between a target sequence and a guide RNA promotes the formation of a RNA-targeting complex. Full complementarity is not necessarily required, provided there is sufficient complementarity to cause hybridization and promote formation of a RNA-targeting complex. In some embodiments, a target sequence is located in the nucleus or cytoplasm of a cell. In some embodiments, the target sequence may be within an organelle of a eukaryotic cell. A sequence or template that may be used for recombination into the targeted locus comprising the target sequences is referred to as an “editing template” or “editing RNA” or “editing sequence”. In aspects of the invention, an exogenous template RNA may be referred to as an editing template. In an aspect of the invention the recombination is homologous recombination. In general, a guide sequence is any polynucleotide sequence having sufficient complementarity with a target polynucleotide sequence to hybridize with the target sequence and direct sequence-specific binding of a nucleic acid-targeting complex to the target sequence. In some embodiments, the degree of complementarity between a guide sequence and its corresponding target sequence, when optimally aligned using a suitable alignment algorithm, is about or more than about 50%, 60%, 75%, 80%, 85%, 90%, 95%, 97.5%, 99%, or more. Optimal alignment may be determined with the use of any suitable algorithm for aligning sequences, non-limiting example of which include the Smith-Waterman algorithm, the Needleman-Wunsch algorithm, algorithms based on the Burrows-Wheeler Transform (e.g. the Burrows Wheeler Aligner), ClustalW, Clustal X, BLAT, Novoalign (Novocraft Technologies, ELAND (Illumina, San Diego, Calif.), SOAP (available at soap.genomics.org.cn), and Maq (available at maq.sourceforge.net). In some embodiments, a guide sequence is about or more than about 5, 10, 11, 12, 13, 14, 15, 16, 17, 18, 19, 20, 21, 22, 23, 24, 25, 26, 27, 28, 29, 30, 35, 40, 45, 50, 75, or more nucleotides in length. In some embodiments, a guide sequence is less than about 75, 50, 45, 40, 35, 30, 25, 20, 15, 12, or fewer nucleotides in length. The ability of a guide sequence to direct sequence-specific binding of a RNA-targeting complex to a target sequence may be assessed by any suitable assay. A template polynucleotide may be of any suitable length, such as about or more than about 10, 15, 20, 25, 50, 75, 100, 150, 200, 500, 1000, or more nucleotides in length. In some embodiments, the template polynucleotide is complementary to a portion of a polynucleotide comprising the target sequence. When optimally aligned, a template polynucleotide might overlap with one or more nucleotides of a target sequences (e.g. about or more than about 1, 5, 10, 15, 20, 25, 30, 35, 40, 45, 50, 60, 70, 80, 90, 100 or more nucleotides). In some embodiments, when a template sequence and a polynucleotide comprising a target sequence are optimally aligned, the nearest nucleotide of the template polynucleotide is within about 1, 5, 10, 15, 20, 25, 50, 75, 100, 200, 300, 400, 500, 1000, 5000, 10000, or more nucleotides from the target sequence. In some embodiments, the RNA-targeting effector protein is part of a fusion protein comprising one or more heterologous protein domains (e.g., about or more than about 1, 2, 3, 4, 5, 6, 7, 8, 9, 10, or more domains in addition to the nucleic acid-targeting effector protein). In some embodiments, the CRISPR Cas13b effector protein/enzyme is part of a fusion protein comprising one or more heterologous protein domains (e.g. about or more than about 1, 2, 3, 4, 5, 6, 7, 8, 9, 10, or more domains in addition to the CRISPR Cas13b enzyme). Examples of protein domains that may be fused to an effector protein include, without limitation, epitope tags, reporter gene sequences, and protein domains having one or more of the following activities: methylase activity, demethylase activity, transcription activation activity, transcription repression activity, transcription release factor activity, histone modification activity, RNA cleavage activity and nucleic acid binding activity. Non-limiting examples of epitope tags include histidine (His) tags, V5 tags, FLAG tags, influenza hemagglutinin (HA) tags, Myc tags, VSV-G tags, and thioredoxin (Trx) tags. Examples of reporter genes include, but are not limited to, glutathione-S-transferase (GST), horseradish peroxidase (HRP), chloramphenicol acetyltransferase (CAT) beta-galactosidase, beta-glucuronidase, luciferase, green fluorescent protein (GFP), HcRed, DsRed, cyan fluorescent protein (CFP), yellow fluorescent protein (YFP), and autofluorescent proteins including blue fluorescent protein (BFP). A nucleic acid-targeting effector protein may be fused to a gene sequence encoding a protein or a fragment of a protein that bind DNA molecules or bind other cellular molecules, including but not limited to maltose binding protein (MBP), S-tag, Lex A DNA binding domain (DBD) fusions, GAL4 DNA binding domain fusions, and herpes simplex virus (HSV) BP16 protein fusions. Additional domains that may form part of a fusion protein comprising a nucleic acid-targeting effector protein are described in US20110059502, incorporated herein by reference. In some embodiments, a tagged nucleic acid-targeting effector protein is used to identify the location of a target sequence. In some embodiments, a CRISPR Cas13b enzyme may form a component of an inducible system. The inducible nature of the system would allow for spatiotemporal control of gene editing or gene expression using a form of energy. The form of energy may include but is not limited to electromagnetic radiation, sound energy, chemical energy and thermal energy. Examples of inducible system include tetracycline inducible promoters (Tet-On or Tet-Off), small molecule two-hybrid transcription activations systems (FKBP, ABA, etc), or light inducible systems (Phytochrome, LOV domains, or cryptochrome). In one embodiment, the CRISPR Cas13b enzyme may be a part of a Light Inducible Transcriptional Effector (LITE) to direct changes in transcriptional activity in a sequence-specific manner. The components of a light may include a CRISPR enzyme, a light-responsive cytochrome heterodimer (e.g. from Arabidopsis thaliana), and a transcriptional activation/repression domain. Further examples of inducible DNA binding proteins and methods for their use are provided in U.S. 61/736,465 and U.S. 61/721,283 and WO 2014/018423 and U.S. Pat. Nos. 8,889,418, 8,895,308, US20140186919, US20140242700, US20140273234, US20140335620, WO2014093635, which is hereby incorporated by reference in its entirety. In some aspects, the invention provides methods comprising delivering one or more polynucleotides, such as or one or more vectors as described herein, one or more transcripts thereof, and/or one or proteins transcribed therefrom, to a host cell. In some aspects, the invention further provides cells produced by such methods, and organisms (such as animals, plants, or fungi) comprising or produced from such cells. In some embodiments, a RNA-targeting effector protein in combination with (and optionally complexed with) a guide RNA or crRNA is delivered to a cell. Conventional viral and non-viral based gene transfer methods can be used to introduce nucleic acids in mammalian cells or target tissues. Such methods can be used to administer nucleic acids encoding components of a RNA-targeting system to cells in culture, or in a host organism. Non-viral vector delivery systems include DNA plasmids, RNA (e.g. a transcript of a vector described herein), naked nucleic acid, and nucleic acid complexed with a delivery vehicle, such as a liposome. Viral vector delivery systems include DNA and RNA viruses, which have either episomal or integrated genomes after delivery to the cell. For a review of gene therapy procedures, see Anderson, Science 256:808-813 (1992); Nabel & Felgner, TIBTECH 11:211-217 (1993); Mitani & Caskey, TIBTECH 11:162-166 (1993); Dillon, TIBTECH 11:167-175 (1993); Miller, Nature 357:455-460 (1992); Van Brunt, Biotechnology 6(10):1149-1154 (1988); Vigne, Restorative Neurology and Neuroscience 8:35-36 (1995); Kremer & Perricaudet, British Medical Bulletin 51(1):31-44 (1995); Haddada et al., in Current Topics in Microbiology and Immunology, Doerfler and Bohm (eds) (1995); and Yu et al., Gene Therapy 1:13-26 (1994). Methods of non-viral delivery of nucleic acids include lipofection, nucleofection, microinjection, biolistics, virosomes, liposomes, immunoliposomes, polycation or lipid:nucleic acid conjugates, naked DNA, artificial virions, and agent-enhanced uptake of DNA. Lipofection is described in e.g., U.S. Pat. Nos. 5,049,386, 4,946,787; and 4,897,355) and lipofection reagents are sold commercially (e.g., Transfectam™ and Lipofectin™). Cationic and neutral lipids that are suitable for efficient receptor-recognition lipofection of polynucleotides include those of Felgner, WO 91/17424; WO 91/16024. Delivery can be to cells (e.g. in vitro or ex vivo administration) or target tissues (e.g. in vivo administration).

### Models of Conditions

[0542] A method of the invention may be used to create a plant, an animal or cell that may be used to model and/or study genetic or epigenetic conditions of interest, such as a through a model of mutations of interest or a disease model. As used herein, “disease” refers to a disease, disorder, or indication in a subject. For example, a method of the invention may be used to create an animal or cell that comprises a modification in one or more nucleic acid sequences associated with a disease, or a plant, animal or cell in which expression of one or more nucleic acid sequences associated with a disease are altered. Such a nucleic acid sequence may encode or be translated a disease associated protein sequence or may be a disease associated control sequence. Accordingly, it is understood that in embodiments of the invention, a plant, subject, patient, organism or cell can be a non-human subject, patient, organism or cell. Thus, the invention provides a plant, animal or cell, produced by the present methods, or a progeny thereof. The progeny may be a clone of the produced plant or animal, or may result from sexual reproduction by crossing with other individuals of the same species to introgress further desirable traits into their offspring. The cell may be in vivo or ex vivo in the cases of multicellular organisms, particularly animals or plants. In the instance where the cell is in cultured, a cell line may be established if appropriate culturing conditions are met and preferably if the cell is suitably adapted for this purpose (for instance a stem cell). Bacterial cell lines produced by the invention are also envisaged. Hence, cell lines are also envisaged. In some methods, the disease model can be used to study the effects of mutations, or more general altered, such as reduced, expression of genes or gene products on the animal or cell and development and/or progression of the disease using measures commonly used in the study of the disease. Alternatively, such a disease model is useful for studying the effect of a pharmaceutically active compound on the disease. In some methods, the disease model can be used to assess the efficacy of a potential gene therapy strategy. That is, a disease-associated RNA can be modified such that the disease development and/or progression is displayed or inhibited or reduced and then effects of a compound on the progression or inhibition or reduction are tested.

[0543] Useful in the practice of the instant invention utilizing Cas13b effector proteins and complexes thereof and nucleic acid molecules encoding same and methods using same, reference is made to: Genome-Scale CRISPR-Cas9 Knockout Screening in Human Cells. Shalem, O., Sanjana, N E., Hartenian, E., Shi, X., Scott, D A., Mikkelson, T., Heckl, D., Ebert, B L., Root, D E., Doench, J G., Zhang, F. Science December 12. (2013). [Epub ahead of print]; Published in final edited form as: Science. 2014 Jan. 3; 343(6166): 84-87. Shalem et al. involves a new way to interrogate gene function on a genome-wide scale. Their studies showed that delivery of a genome-scale CRISPR-Cas9 knockout (GeCKO) library targeted 18,080 genes with 64,751 unique guide sequences enabled both negative and positive selection screening in human cells. First, the authors showed use of the GeCKO library to identify genes essential for cell viability in cancer and pluripotent stem cells. Next, in a melanoma model, the authors screened for genes whose loss is involved in resistance to vemurafenib, a therapeutic that inhibits mutant protein kinase BRAF. Their studies showed that the highest-ranking candidates included previously validated genes NF1 and MED12 as well as novel hitsNF2, CUL3, TADA2B, and TADA1. The authors observed a high level of consistency between independent guide RNAs targeting the same gene and a high rate of hit confirmation, and thus demonstrated the promise of genome-scale screening with Cas9. Reference is also made to US patent publication number US20140357530; and PCT Patent Publication WO2014093701, hereby incorporated herein by reference.

[0544] The term “associated with” is used here in relation to the association of the functional domain to the Cas13b effector protein or the adaptor protein. It is used in respect of how one molecule ‘associates’ with respect to another, for example between an adaptor protein and a functional domain, or between the Cas13b effector protein and a functional domain. In the case of such protein-protein interactions, this association may be viewed in terms of recognition in the way an antibody recognizes an epitope. Alternatively, one protein may be associated with another protein via a fusion of the two, for instance one subunit being fused to another subunit. Fusion typically occurs by addition of the amino acid sequence of one to that of the other, for instance via splicing together of the nucleotide sequences that encode each protein or subunit. Alternatively, this may essentially be viewed as binding between two molecules or direct linkage, such as a fusion protein. In any event, the fusion protein may include a linker between the two subunits of interest (i.e. between the enzyme and the functional domain or between the adaptor protein and the functional domain). Thus, in some embodiments, the Cas13b effector protein or adaptor protein is associated with a functional domain by binding thereto. In other embodiments, the Cas13b effector protein or adaptor protein is associated with a functional domain because the two are fused together, optionally via an intermediate linker.

### Cas13b Effector Protein Complexes can be Used in Plants

[0545] The invention in some embodiments comprehends a method of modifying an cell or organism. The cell may be a prokaryotic cell or a eukaryotic cell. The cell may be a mammalian cell. The mammalian cell many be a non-human primate, bovine, porcine, rodent or mouse cell. The cell may be a non-mammalian eukaryotic cell such as poultry, fish or shrimp. The cell may also be a plant cell. The plant cell may be of a crop plant such as cassava, corn, sorghum, wheat, or rice. The plant cell may also be of an algae, tree or vegetable. The modification introduced to the cell by the present invention may be such that the cell and progeny of the cell are altered for improved production of biologic products such as an antibody, starch, alcohol or other desired cellular output. The modification introduced to the cell by the present invention may be such that the cell and progeny of the cell include an alteration that changes the biologic product produced. The system may comprise one or more different vectors. In an aspect of the invention, the effector protein is codon optimized for expression the desired cell type, preferentially a eukaryotic cell, preferably a mammalian cell or a human cell. Cas13b system(s) (e.g., single or multiplexed) can be used in conjunction with recent advances in crop genomics. Such CRISPR system(s) can be used to perform efficient and cost effective plant gene or genome or transcriptome interrogation or editing or manipulation—for instance, for rapid investigation and/or selection and/or interrogations and/or comparison and/or manipulations and/or transformation of plant genes or genomes; e.g., to create, identify, develop, optimize, or confer trait(s) or characteristic(s) to plant(s) or to transform a plant genome. There can accordingly be improved production of plants, new plants with new combinations of traits or characteristics or new plants with enhanced traits. Such CRISPR system(s) can be used with regard to plants in Site-Directed Integration (SDI) or Gene Editing (GE) or any Near Reverse Breeding (NRB) or Reverse Breeding (RB) techniques. Accordingly, reference herein to animal cells may also apply, mutatis mutandis, to plant cells unless otherwise apparent; and, the enzymes herein having reduced off-target effects and systems employing such enzymes can be used in plant applications, including those mentioned herein. Engineered plants modified by the effector protein (Cas13b) and suitable guide (crRNA), and progeny thereof, as provided. These may include disease or drought resistant crops, such as wheat, barley, rice, soybean or corn; plants modified to remove or reduce the ability to self-pollinate (but which can instead, optionally, hybridise instead); and allergenic foods such as peanuts and nuts where the immunogenic proteins have been disabled, destroyed or disrupted by targeting via a effector protein and suitable guide. Any aspect of using classical CRIPSR-Cas systems may be adapted to use in CRISPR systems that are Cas protein agnostic, e.g. Cas13b effector protein systems.

### Therapeutic Treatment

[0546] The system of the invention can be applied in areas of former RNA cutting technologies, without undue experimentation, from this disclosure, including therapeutic, assay and other applications, because the present application provides the foundation for informed engineering of the system. The present invention provides for therapeutic treatment of a disease caused by overexpression of RNA, toxic RNA and/or mutated RNA (such as, for example, splicing defects or truncations). Expression of the toxic RNA may be associated with formation of nuclear inclusions and late-onset degenerative changes in brain, heart or skeletal muscle. In the best studied example, myotonic dystrophy, it appears that the main pathogenic effect of the toxic RNA is to sequester binding proteins and compromise the regulation of alternative splicing (Hum. Mol. Genet. (2006) 15 (suppl 2): R162-R169). Myotonic dystrophy [dystrophia myotonica (DM)] is of particular interest to geneticists because it produces an extremely wide range of clinical features. A partial listing would include muscle wasting, cataracts, insulin resistance, testicular atrophy, slowing of cardiac conduction, cutaneous tumors and effects on cognition. The classical form of DM, which is now called DM type 1 (DM1), is caused by an expansion of CTG repeats in the 3′-untranslated region (UTR) of DMPK, a gene encoding a cytosolic protein kinase.

[0547] The innate immune system detects viral infection primarily by recognizing viral nucleic acids inside an infected cell, referred to as DNA or RNA sensing. In vitro RNA sensing assays can be used to detect specific RNA substrates. The RNA targeting effector protein can for instance be used for RNA-based sensing in living cells. Examples of applications are diagnostics by sensing of, for examples, disease-specific RNAs. The RNA targeting effector protein (Cas13b) of the invention can further be used for antiviral activity, in particular against RNA viruses. The effector protein (Cas13b) can be targeted to the viral RNA using a suitable guide RNA selective for a selected viral RNA sequence. In particular, the effector protein may be an active nuclease that cleaves RNA, such as single stranded RNA. Therapeutic dosages of the enzyme system of the present invention to target RNA the above-referenced RNAs are contemplated to be about 0.1 to about 2 mg/kg the dosages may be administered sequentially with a monitored response, and repeated dosages if necessary, up to about 7 to 10 doses per patient. Advantageously, samples are collected from each patient during the treatment regimen to ascertain the effectiveness of treatment. For example, RNA samples may be isolated and quantified to determine if expression is reduced or ameliorated. Such a diagnostic is within the purview of one of skill in the art.

### Transcriptome Wide Knock-Down Screening

[0548] The CRISPR effector protein complexes described herein can be used to perform efficient and cost effective functional transcriptonic screens. Such screens can utilize CRISPR effector protein based transcriptome wide libraries. Such screens and libraries can provide for determining the function of genes, cellular pathways genes are involved in, and how any alteration in gene expression can result in a particular biological process. An advantage of the present invention is that the CRISPR system avoids off-target binding and its resulting side effects. This is achieved using systems arranged to have a high degree of sequence specificity for the target RNA. In preferred embodiments of the invention, the CRISPR effector protein complexes are Cas13b effector protein complexes.

[0549] In embodiments of the invention, a transcriptome wide library may comprise a plurality of Cas13b guide RNAs, as described herein, comprising guide sequences that are capable of targeting a plurality of target sequences in a plurality of loci in a population of eukaryotic cells. The population of cells may be a population of embryonic stem (ES) cells. The target sequence in the locus may be a non-coding sequence. The non-coding sequence may be an intron, regulatory sequence, splice site, 3′ UTR, 5′ UTR, or polyadenylation signal. Gene function of one or more gene products may be altered by said targeting. The targeting may result in a knockout of gene function. The targeting of a gene product may comprise more than one guide RNA. A gene product may be targeted by 2, 3, 4, 5, 6, 7, 8, 9, or 10 guide RNAs, preferably 3 to 4 per gene. Off-target modifications may be minimized by exploiting the staggered double strand breaks generated by Cas13b effector protein complexes or by utilizing methods analogous to those used in CRISPR-Cas9 systems (See, e.g., DNA targeting specificity of RNA-guided Cas9 nucleases. Hsu, P., Scott, D., Weinstein, J., Ran, F A., Konermann, S., Agarwala, V., Li, Y., Fine, E., Wu, X., Shalem, O., Cradick, T J., Marraffini, L A., Bao, Zhang, F. Nat Biotechnol doi:10.1038/nbt.2647 (2013)), incorporated herein by reference. The targeting may be of about 100 or more sequences. The targeting may be of about 1000 or more sequences. The targeting may be of about 20,000 or more sequences. The targeting may be of the entire genome. The targeting may be of a panel of target sequences focused on a relevant or desirable pathway. The pathway may be an immune pathway. The pathway may be a cell division pathway.

[0550] One aspect of the invention comprehends a transcriptome wide library that may comprise a plurality of cas13b guide RNAs that may comprise guide sequences that are capable of targeting a plurality of target sequences in a plurality of loci, wherein said targeting results in a knockdown of gene function. This library may potentially comprise guide RNAs that target each and every gene in the genome of an organism.

[0551] In some embodiments of the invention the organism or subject is a eukaryote (including mammal including human) or a non-human eukaryote or a non-human animal or a non-human mammal. In some embodiments, the organism or subject is a non-human animal, and may be an arthropod, for example, an insect, or may be a nematode. In some methods of the invention the organism or subject is a plant. In some methods of the invention the organism or subject is a mammal or a non-human mammal. A non-human mammal may be for example a rodent (preferably a mouse or a rat), an ungulate, or a primate. In some methods of the invention the organism or subject is algae, including microalgae, or is a fungus.

[0552] The knockdown of gene function may comprise: introducing into each cell in the population of cells a vector system of one or more vectors comprising an engineered, non-naturally occurring Cas13b effector protein system comprising I. a Cas13b effector protein, and II. one or more guide RNAs, wherein components I and II may be same or on different vectors of the system, integrating components I and II into each cell, wherein the guide sequence targets a unique gene in each cell, wherein the Cas13b effector protein is operably linked to a regulatory element, wherein when transcribed, the guide RNA comprising the guide sequence directs sequence-specific binding of the Cas13b effector protein system to a target sequence in the genomic loci of the unique gene, inducing cleavage of the genomic loci by the Cas13b effector protein, and confirming different knockdown events in a plurality of unique genes in each cell of the population of cells thereby generating a gene knockdown cell library. The invention comprehends that the population of cells is a population of eukaryotic cells, and in a preferred embodiment, the population of cells is a population of embryonic stem (ES) cells.

[0553] The one or more vectors may be plasmid vectors. The vector may be a single vector comprising a Cas13b effector protein, a sgRNA, and optionally, a selection marker into target cells. Not being bound by a theory, the ability to simultaneously deliver a Cas13b effector protein and sgRNA through a single vector enables application to any cell type of interest, without the need to first generate cell lines that express the Cas13b effector protein. The regulatory element may be an inducible promoter. The inducible promoter may be a doxycycline inducible promoter. In some methods of the invention the expression of the guide sequence is under the control of the T7 promoter and is driven by the expression of T7 polymerase. The confirming of different knockdown events may be by whole transcriptome sequencing. The knockdown event may be achieved in 100 or more unique genes. The knockdown event may be achieved in 1000 or more unique genes. The knockdown event may be achieved in 20,000 or more unique genes. The knockdown event may be achieved in the entire transcriptome. The knockdown of gene function may be achieved in a plurality of unique genes which function in a particular physiological pathway or condition. The pathway or condition may be an immune pathway or condition. The pathway or condition may be a cell division pathway or condition.

[0554] The invention also provides kits that comprise the transcriptome wide libraries mentioned herein. The kit may comprise a single container comprising vectors or plasmids comprising the library of the invention. The kit may also comprise a panel comprising a selection of unique Cas13b effector protein system guide RNAs comprising guide sequences from the library of the invention, wherein the selection is indicative of a particular physiological condition. The invention comprehends that the targeting is of about 100 or more sequences, about 1000 or more sequences or about 20,000 or more sequences or the entire transcriptome. Furthermore, a panel of target sequences may be focused on a relevant or desirable pathway, such as an immune pathway or cell division.

[0555] In an additional aspect of the invention, the Cas13b effector protein may comprise one or more mutations and may be used as a generic RNA binding protein with or without fusion to a functional domain. The mutations may be artificially introduced mutations or gain- or loss-of-function mutations. The mutations have been characterized as described herein. In one aspect of the invention, the functional domain may be a transcriptional activation domain, which may be VP64. In other aspects of the invention, the functional domain may be a transcriptional repressor domain, which may be KRAB or SID4×. Other aspects of the invention relate to the mutated Cas13b effector protein being fused to domains which include but are not limited to a transcriptional activator, repressor, a recombinase, a transposase, a histone remodeler, a demethylase, a DNA methyltransferase, a cryptochrome, a light inducible/controllable domain or a chemically inducible/controllable domain. Some methods of the invention can include inducing expression of targeted genes. In one embodiment, inducing expression by targeting a plurality of target sequences in a plurality of genomic loci in a population of eukaryotic cells is by use of a functional domain.

[0556] Useful in the practice of the instant invention utilizing Cas13b effector protein complexes are methods used in CRISPR-Cas9 systems and reference is made to:

[0557] Genome-Scale CRISPR-Cas9 Knockout Screening in Human Cells. Shalem, O., Sanjana, N E., Hartenian, E., Shi, X., Scott, D A., Mikkelson, T., Heckl, D., Ebert, B L., Root, D E., Doench, J G., Zhang, F. Science Dec. 12, 2013. [Epub ahead of print]; Published in final edited form as: Science. 2014 Jan. 3; 343(6166): 84-87.

[0558] Shalem et al. involves a new way to interrogate gene function on a genome-wide scale. Their studies showed that delivery of a genome-scale CRISPR-Cas9 knockout (GeCKO) library targeted 18,080 genes with 64,751 unique guide sequences enabled both negative and positive selection screening in human cells. First, the authors showed use of the GeCKO library to identify genes essential for cell viability in cancer and pluripotent stem cells. Next, in a melanoma model, the authors screened for genes whose loss is involved in resistance to vemurafenib, a therapeutic that inhibits mutant protein kinase BRAF. Their studies showed that the highest-ranking candidates included previously validated genes NF1 and MED12 as well as novel hitsNF2, CUL3, TADA2B, and TADA1. The authors observed a high level of consistency between independent guide RNAs targeting the same gene and a high rate of hit confirmation, and thus demonstrated the promise of genome-scale screening with Cas9.

[0559] Reference is also made to US patent publication number US20140357530; and PCT Patent Publication WO2014093701, hereby incorporated herein by reference.

### Functional Alteration and Screening

[0560] In another aspect, the present invention provides for a method of functional evaluation and screening of genes. The use of the CRISPR system of the present invention to precisely deliver functional domains, to activate or repress genes or to alter epigenetic state by precisely altering the methylation site on a a specific locus of interest, can be with one or more guide RNAs applied to a single cell or population of cells or with a library applied to genome in a pool of cells ex vivo or in vivo comprising the administration or expression of a library comprising a plurality of guide RNAs (sgRNAs) and wherein the screening further comprises use of a Cas13b effector protein, wherein the CRISPR complex comprising the Cas13b effector protein is modified to comprise a heterologous functional domain. In an aspect the invention provides a method for screening a genome/transcriptome comprising the administration to a host or expression in a host in vivo of a library. In an aspect the invention provides a method as herein discussed further comprising an activator administered to the host or expressed in the host. In an aspect the invention provides a method as herein discussed wherein the activator is attached to a Cas13b effector protein. In an aspect the invention provides a method as herein discussed wherein the activator is attached to the N terminus or the C terminus of the Cas13b effector protein. In an aspect the invention provides a method as herein discussed wherein the activator is attached to a sgRNA loop. In an aspect the invention provides a method as herein discussed further comprising a repressor administered to the host or expressed in the host. In an aspect the invention provides a method as herein discussed, wherein the screening comprises affecting and detecting gene activation, gene inhibition, or cleavage in the locus.

[0561] In an aspect, the invention provides efficient on-target activity and minimizes off target activity. In an aspect, the invention provides efficient on-target cleavage by Cas13b effector protein and minimizes off-target cleavage by the Cas13b effector protein. In an aspect, the invention provides guide specific binding of Cas13b effector protein at a gene locus without DNA cleavage. Accordingly, in an aspect, the invention provides target-specific gene regulation. In an aspect, the invention provides guide specific binding of Cas13b effector protein at a gene locus without DNA cleavage. Accordingly, in an aspect, the invention provides for cleavage at one locus and gene regulation at a different locus using a single Cas13b effector protein. In an aspect, the invention provides orthogonal activation and/or inhibition and/or cleavage of multiple targets using one or more Cas13b effector protein and/or enzyme.

[0562] In an aspect the invention provides a method as herein discussed, wherein the host is a eukaryotic cell. In an aspect the invention provides a method as herein discussed, wherein the host is a mammalian cell. In an aspect the invention provides a method as herein discussed, wherein the host is a non-human eukaryote. In an aspect the invention provides a method as herein discussed, wherein the non-human eukaryote is a non-human mammal. In an aspect the invention provides a method as herein discussed, wherein the non-human mammal is a mouse. An aspect the invention provides a method as herein discussed comprising the delivery of the Cas13b effector protein complexes or component(s) thereof or nucleic acid molecule(s) coding therefor, wherein said nucleic acid molecule(s) are operatively linked to regulatory sequence(s) and expressed in vivo. In an aspect the invention provides a method as herein discussed wherein the expressing in vivo is via a lentivirus, an adenovirus, or an AAV. In an aspect the invention provides a method as herein discussed wherein the delivery is via a particle, a nanoparticle, a lipid or a cell penetrating peptide (CPP).

[0563] In an aspect the invention provides a pair of CRISPR complexes comprising Cas13b effector protein, each comprising a guide RNA (sgRNA) comprising a guide sequence capable of hybridizing to a target sequence in a genomic locus of interest in a cell, wherein at least one loop of each sgRNA is modified by the insertion of distinct RNA sequence(s) that bind to one or more adaptor proteins, and wherein the adaptor protein is associated with one or more functional domains, wherein each sgRNA of each Cas13b effector protein complex comprises a functional domain having a DNA cleavage activity.

[0564] In an aspect the invention provides a method for cutting a target sequence in a locus of interest comprising delivery to a cell of the Cas13b effector protein complexes or component(s) thereof or nucleic acid molecule(s) coding therefor, wherein said nucleic acid molecule(s) are operatively linked to regulatory sequence(s) and expressed in vivo. In an aspect the invention provides a method as herein-discussed wherein the delivery is via a lentivirus, an adenovirus, or an AAV.

[0565] In an aspect the invention provides a library, method or complex as herein-discussed wherein the sgRNA is modified to have at least one non-coding functional loop, e.g., wherein the at least one non-coding functional loop is repressive; for instance, wherein the at least one non-coding functional loop comprises Alu.

[0566] In one aspect, the invention provides a method for altering or modifying expression of a gene product. The said method may comprise introducing into a cell containing and expressing a DNA molecule encoding the gene product an engineered, non-naturally occurring CRISPR system comprising a Cas13b effector protein and guide RNA that targets the RNA molecule, whereby the guide RNA targets the RNA target molecule encoding the gene product and the Cas13b effector protein cleaves the RNA molecule encoding the gene product, whereby expression of the gene product is altered; and, wherein the Cas13b effector protein and the guide RNA do not naturally occur together. The invention comprehends the guide RNA comprising a guide sequence linked to a direct repeat sequence. The invention further comprehends the Cas13b effector protein being codon optimized for expression in a Eukaryotic cell. In a preferred embodiment the Eukaryotic cell is a mammalian cell and in a more preferred embodiment the mammalian cell is a human cell. In a further embodiment of the invention, the expression of the gene product is decreased.

[0567] In some embodiments, one or more functional domains are associated with the Cas13b effector protein. In some embodiments, one or more functional domains are associated with an adaptor protein, for example as used with the modified guides of Konnerman et al. (Nature 517, 583-588, 29 Jan. 2015). In some embodiments, one or more functional domains are associated with an dead sgRNA (dRNA). In some embodiments, a dRNA complex with active Cas13b effector protein directs gene regulation by a functional domain at on gene locus while an sgRNA directs DNA cleavage by the active Cas13b effector protein at another locus, for example as described analogously in CRISPR-Cas9 systems by Dahlman et al., ‘Orthogonal gene control with a catalytically active Cas9 nuclease,’ Nature Biotechnology 33, p. 1159-61 (November, 2015). In some embodiments, dRNAs are selected to maximize selectivity of regulation for a gene locus of interest compared to off-target regulation. In some embodiments, dRNAs are selected to maximize target gene regulation and minimize target cleavage

[0568] For the purposes of the following discussion, reference to a functional domain could be a functional domain associated with the Cas13b effector protein or a functional domain associated with the adaptor protein.

[0569] In some embodiments, the one or more functional domains is an NLS (Nuclear Localization Sequence) or an NES (Nuclear Export Signal). In some embodiments, the one or more functional domains is a transcriptional activation domain comprises VP64, p65, MyoD1, HSF1, RTA, SETT/9 and a histone acetyltransferase. Other references herein to activation (or activator) domains in respect of those associated with the CRISPR enzyme include any known transcriptional activation domain and specifically VP64, p65, MyoD1, HSF1, RTA, SETT/9 or a histone acetyltransferase.

[0570] In some embodiments, the one or more functional domains is a transcriptional repressor domain. In some embodiments, the transcriptional repressor domain is a KRAB domain. In some embodiments, the transcriptional repressor domain is a NuE domain, NcoR domain, SID domain or a SID4× domain.

[0571] In some embodiments, the one or more functional domains have one or more activities comprising translation activation activity, translation repression activity, methylase activity, demethylase activity, transcription activation activity, transcription repression activity, transcription release factor activity, histone modification activity, RNA cleavage activity, DNA cleavage activity, DNA integration activity or nucleic acid binding activity.

[0572] In some embodiments, the DNA cleavage activity is due to a nuclease. In some embodiments, the nuclease comprises a Fok1 nuclease. See, “Dimeric CRISPR RNA-guided Fok1 nucleases for highly specific genome editing”, Shengdar Q. Tsai, Nicolas Wyvekens, Cyd Khayter, Jennifer A. Foden, Vishal Thapar, Deepak Reyon, Mathew J. Goodwin, Martin J. Aryee, J. Keith Joung Nature Biotechnology 32(6): 569-77 (2014), relates to dimeric RNA-guided Fok1 Nucleases that recognize extended sequences and can edit endogenous genes with high efficiencies in human cells.

[0573] In some embodiments, the one or more functional domains is attached to the Cas13b effector protein so that upon binding to the sgRNA and target the functional domain is in a spatial orientation allowing for the functional domain to function in its attributed function.

[0574] In some embodiments, the one or more functional domains is attached to the adaptor protein so that upon binding of the Cas13b effector protein to the sgRNA and target, the functional domain is in a spatial orientation allowing for the functional domain to function in its attributed function.

[0575] In an aspect the invention provides a composition as herein discussed wherein the one or more functional domains is attached to the Cas13b effector protein or adaptor protein via a linker, optionally a GlySer linker, as discussed herein.

[0576] It is also preferred to target endogenous (regulatory) control elements, such as involved in translation, stability, etc. Targeting of known control elements can be used to activate or repress the gene of interest. Targeting of putative control elements on the other hand can be used as a means to verify such elements (by measuring the translation of the gene of interest) or to detect novel control elements (In addition, targeting of putative control elements can be useful in the context of understanding genetic causes of disease. Many mutations and common SNP variants associated with disease phenotypes are located outside coding regions. Targeting of such regions with either the activation or repression systems described herein can be followed by readout of transcription of either a) a set of putative targets (e.g. a set of genes located in closest proximity to the control element) or b) whole-transcriptome readout by e.g. RNAseq or microarray. This would allow for the identification of likely candidate genes involved in the disease phenotype. Such candidate genes could be useful as novel drug targets.

[0577] Histone acetyltransferase (HAT) inhibitors are mentioned herein. However, an alternative in some embodiments is for the one or more functional domains to comprise an acetyltransferase, preferably a histone acetyltransferase. These are useful in the field of epigenomics, for example in methods of interrogating the epigenome. Methods of interrogating the epigenome may include, for example, targeting epigenomic sequences. Targeting epigenomic sequences may include the guide being directed to an epigenomic target sequence. Epigenomic target sequence may include, in some embodiments, include a promoter, silencer or an enhancer sequence.

[0578] Use of a functional domain linked to a Cas13b effector protein as described herein, preferably a dead-Cas13b effector protein, more preferably a dead-FnCas13b effector protein, to target epigenomic sequences can be used to activate or repress promoters, silencer or enhancers.

[0579] Examples of acetyltransferases are known but may include, in some embodiments, histone acetyltransferases. In some embodiments, the histone acetyltransferase may comprise the catalytic core of the human acetyltransferase p300 (Gerbasch & Reddy, Nature Biotech 6 Apr. 2015).

[0580] In some preferred embodiments, the functional domain is linked to a dead-Cas13b effector protein to target and activate epigenomic sequences such as promoters or enhancers. One or more guides directed to such promoters or enhancers may also be provided to direct the binding of the CRISPR enzyme to such promoters or enhancers.

[0581] In certain embodiments, the RNA targeting effector protein of the invention can be used to interfere with co-transcriptional modifications of DNA/chromatin structure, RNA-directed DNA methylation, or RNA-directed silencing/activation of DNA/chromatin. RNA-directed DNA methylation (RdDM) is an epigenetic process first discovered in plants. During RdDM, double-stranded RNAs (dsRNAs) are processed to 21-24 nucleotide small interfering RNAs (siRNAs) and guide methylation of homologous DNA loci. Besides RNA molecules, a plethora of proteins are involved in the establishment of RdDM, like Argonautes, DNA methyltransferases, chromatin remodelling complexes and the plant-specific PolIV and PolV. All these act in concert to add a methyl-group at the 5′ position of cytosines. Small RNAs can modify the chromatin structure and silence transcription by guiding Argonaute-containing complexes to complementary nascent (non-coding) RNA trancripts. Subsequently the recruitment of chromatin-modifying complexes, including histone and DNA methyltransferases, is mediated. The RNA targeting effector protein of the invention may be used to target such small RNAs and interfere in interactions between these small RNAs and the nascent non-coding transcripts.

[0582] The term “associated with” is used here in relation to the association of the functional domain to the Cas13b effector protein or the adaptor protein. It is used in respect of how one molecule ‘associates’ with respect to another, for example between an adaptor protein and a functional domain, or between the Cas13b effector protein and a functional domain. In the case of such protein-protein interactions, this association may be viewed in terms of recognition in the way an antibody recognizes an epitope. Alternatively, one protein may be associated with another protein via a fusion of the two, for instance one subunit being fused to another subunit. Fusion typically occurs by addition of the amino acid sequence of one to that of the other, for instance via splicing together of the nucleotide sequences that encode each protein or subunit. Alternatively, this may essentially be viewed as binding between two molecules or direct linkage, such as a fusion protein. In any event, the fusion protein may include a linker between the two subunits of interest (i.e. between the enzyme and the functional domain or between the adaptor protein and the functional domain). Thus, in some embodiments, the Cas13b effector protein or adaptor protein is associated with a functional domain by binding thereto. In other embodiments, the Cas13b effector protein or adaptor protein is associated with a functional domain because the two are fused together, optionally via an intermediate linker.

### Saturating Mutagenesis

[0583] The Cas13b effector protein system(s) described herein can be used to perform saturating or deep scanning mutagenesis of genomic loci in conjunction with a cellular phenotype—for instance, for determining critical minimal features and discrete vulnerabilities of functional elements required for gene expression, drug resistance, and reversal of disease. By saturating or deep scanning mutagenesis is meant that every or essentially every RNA base is cut within the genomic loci. A library of Cas13b effector protein guide RNAs may be introduced into a population of cells. The library may be introduced, such that each cell receives a single guide RNA (sgRNA). In the case where the library is introduced by transduction of a viral vector, as described herein, a low multiplicity of infection (MOI) is used. The library may include sgRNAs targeting every sequence upstream of a (protospacer adjacent motif) (PAM) sequence in a genomic locus. The library may include at least 100 non-overlapping genomic sequences upstream of a PAM sequence for every 1000 base pairs within the genomic locus. The library may include sgRNAs targeting sequences upstream of at least one different PAM sequence. The Cas13b effector protein systems may include more than one Cas13b protein. Any Cas13b effector protein as described herein, including orthologues or engineered Cas13b effector proteins that recognize different PAM sequences may be used. The frequency of off target sites for a sgRNA may be less than 500. Off target scores may be generated to select sgRNAs with the lowest off target sites. Any phenotype determined to be associated with cutting at a sgRNA target site may be confirmed by using sgRNAs targeting the same site in a single experiment. Validation of a target site may also be performed by using a modified Cas13b effector protein, as described herein, and two sgRNAs targeting the genomic site of interest. Not being bound by a theory, a target site is a true hit if the change in phenotype is observed in validation experiments.

[0584] The Cas13b effector protein system(s) for saturating or deep scanning mutagenesis can be used in a population of cells. The Cas13b effector protein system(s) can be used in eukaryotic cells, including but not limited to mammalian and plant cells. The population of cells may be prokaryotic cells. The population of eukaryotic cells may be a population of embryonic stem (ES) cells, neuronal cells, epithelial cells, immune cells, endocrine cells, muscle cells, erythrocytes, lymphocytes, plant cells, or yeast cells.

[0585] In one aspect, the present invention provides for a method of screening for functional elements associated with a change in a phenotype. The library may be introduced into a population of cells that are adapted to contain a Cas13b effector protein. The cells may be sorted into at least two groups based on the phenotype. The phenotype may be expression of a gene, cell growth, or cell viability. The relative representation of the guide RNAs present in each group are determined, whereby genomic sites associated with the change in phenotype are determined by the representation of guide RNAs present in each group. The change in phenotype may be a change in expression of a gene of interest. The gene of interest may be upregulated, downregulated, or knocked out. The cells may be sorted into a high expression group and a low expression group. The population of cells may include a reporter construct that is used to determine the phenotype. The reporter construct may include a detectable marker. Cells may be sorted by use of the detectable marker.

[0586] In another aspect, the present invention provides for a method of screening for loci associated with resistance to a chemical compound. The chemical compound may be a drug or pesticide. The library may be introduced into a population of cells that are adapted to contain a Cas13b effector protein, wherein each cell of the population contains no more than one guide RNA; the population of cells are treated with the chemical compound; and the representation of guide RNAs are determined after treatment with the chemical compound at a later time point as compared to an early time point, whereby genomic sites associated with resistance to the chemical compound are determined by enrichment of guide RNAs. Representation of sgRNAs may be determined by deep sequencing methods.

[0587] Useful in the practice of the instant invention utilizing Cas13beffector protein complexes are methods used in CRISPR-Cas9 systems and reference is made to the article entitled BCL11A enhancer dissection by Cas9-mediated in situ saturating mutagenesis. Canver, M. C., Smith, E. C., Sher, F., Pinello, L., Sanjana, N. E., Shalem, O., Chen, D. D., Schupp, P. G., Vinjamur, D. S., Garcia, S. P., Luc, S., Kurita, R., Nakamura, Y., Fujiwara, Y., Maeda, T., Yuan, G., Zhang, F., Orkin, S. H., & Bauer, D. E. DOI:10.1038/nature15521, published online Sep. 16, 2015, the article is herein incorporated by reference and discussed briefly below:

[0588] Canver et al. involves novel pooled CRISPR-Cas9 guide RNA libraries to perform in situ saturating mutagenesis of the human and mouse BCL11A erythroid enhancers previously identified as an enhancer associated with fetal hemoglobin (HbF) level and whose mouse ortholog is necessary for erythroid BCL11A expression. This approach revealed critical minimal features and discrete vulnerabilities of these enhancers. Through editing of primary human progenitors and mouse transgenesis, the authors validated the BCL11A erythroid enhancer as a target for HbF reinduction. The authors generated a detailed enhancer map that informs therapeutic genome editing.

### Method of Using Cas13b Systems to Modify a Cell or Organism

[0589] The invention in some embodiments comprehends a method of modifying a cell or organism. The cell may be a prokaryotic cell or a eukaryotic cell. The cell may be a mammalian cell. The mammalian cell many be a non-human primate, bovine, porcine, rodent or mouse cell. The cell may be a non-mammalian eukaryotic cell such as poultry, fish or shrimp. The cell may also be a plant cell. The plant cell may be of a crop plant such as cassava, corn, sorghum, wheat, or rice. The plant cell may also be of an algae, tree or vegetable. The modification introduced to the cell by the present invention may be such that the cell and progeny of the cell are altered for improved production of biologic products such as an antibody, starch, alcohol or other desired cellular output. The modification introduced to the cell by the present invention may be such that the cell and progeny of the cell include an alteration that changes the biologic product produced.

[0590] The system may comprise one or more different vectors. In an aspect of the invention, the effector protein is codon optimized for expression the desired cell type, preferentially a eukaryotic cell, preferably a mammalian cell or a human cell.

[0591] Packaging cells are typically used to form virus particles that are capable of infecting a host cell. Such cells include 293 cells, which package adenovirus, and w2 cells or PA317 cells, which package retrovirus. Viral vectors used in gene therapy are usually generated by producing a cell line that packages a nucleic acid vector into a viral particle. The vectors typically contain the minimal viral sequences required for packaging and subsequent integration into a host, other viral sequences being replaced by an expression cassette for the polynucleotide(s) to be expressed. The missing viral functions are typically supplied in trans by the packaging cell line. For example, AAV vectors used in gene therapy typically only possess ITR sequences from the AAV genome which are required for packaging and integration into the host genome. Viral DNA is packaged in a cell line, which contains a helper plasmid encoding the other AAV genes, namely rep and cap, but lacking ITR sequences. The cell line may also be infected with adenovirus as a helper. The helper virus promotes replication of the AAV vector and expression of AAV genes from the helper plasmid. The helper plasmid is not packaged in significant amounts due to a lack of ITR sequences. Contamination with adenovirus can be reduced by, e.g., heat treatment to which adenovirus is more sensitive than AAV. Additional methods for the delivery of nucleic acids to cells are known to those skilled in the art. See, for example, US20030087817, incorporated herein by reference.

[0592] In some embodiments, a host cell is transiently or non-transiently transfected with one or more vectors described herein. In some embodiments, a cell is transfected as it naturally occurs in a subject. In some embodiments, a cell that is transfected is taken from a subject. In some embodiments, the cell is derived from cells taken from a subject, such as a cell line. A wide variety of cell lines for tissue culture are known in the art. Examples of cell lines include, but are not limited to, C8161, CCRF-CEM, MOLT, mIMCD-3, NHDF, HeLa—S3, Huh1, Huh4, Huh7, HUVEC, HASMC, HEKn, HEKa, MiaPaCell, Panc1, PC-3, TF1, CTLL-2, C1R, Rath, CV1, RPTE, A10, T24, J82, A375, ARH-77, Calu1, SW480, SW620, SKOV3, SK-UT, CaCo2, P388D1, SEM-K2, WEHI-231, HB56, TIB55, Jurkat, J45.01, LRMB, Bcl-1, BC-3, IC21, DLD2, Raw264.7, NRK, NRK-52E, MRCS, MEF, Hep G2, HeLa B, HeLa T4, COS, COS-1, COS-6, COS-M6A, BS—C-1 monkey kidney epithelial, BALB/3T3 mouse embryo fibroblast, 3T3 Swiss, 3T3-L1, 132-d5 human fetal fibroblasts; 10.1 mouse fibroblasts, 293-T, 3T3, 721, 9L, A2780, A2780ADR, A2780cis, A172, A20, A253, A431, A-549, ALC, B16, B35, BCP-1 cells, BEAS-2B, bEnd.3, BHK-21, BR 293, BxPC3, C3H-10T1/2, C6/36, Cal-27, CHO, CHO-7, CHO-IR, CHO-K1, CHO-K2, CHO-T, CHO Dhfr −/−, COR-L23, COR-L23/CPR, COR-L23/5010, COR-L23/R23, COS-7, COV-434, CML T1, CMT, CT26, D17, DH82, DU145, DuCaP, EL4, EM2, EM3, EMT6/AR1, EMT6/AR10.0, FM3, H1299, H69, HB54, HB55, HCA2, HEK-293, HeLa, Hepalc1c7, HL-60, HMEC, HT-29, Jurkat, JY cells, K562 cells, Ku812, KCL22, KG1, KYO1, LNCap, Ma-Mel 1-48, MC-38, MCF-7, MCF-10A, MDA-MB-231, MDA-MB-468, MDA-MB-435, MDCK II, MDCK II, MOR/0.2R, MONO-MAC 6, MTD-1A, MyEnd, NCI-H69/CPR, NCI-H69/LX10, NCI-H69/LX20, NCI-H69/LX4, NIH-3T3, NALM-1, NW-145, OPCN/OPCT cell lines, Peer, PNT-1A/PNT 2, RenCa, RIN-5F, RMA/RMAS, Saos-2 cells, Sf-9, SkBr3, T2, T-47D, T84, THP1 cell line, U373, U87, U937, VCaP, Vero cells, WM39, WT-49, X63, YAC-1, YAR, and transgenic varieties thereof. Cell lines are available from a variety of sources known to those with skill in the art (see, e.g., the American Type Culture Collection (ATCC) (Manassas, Va.)). In some embodiments, a cell transfected with one or more vectors described herein is used to establish a new cell line comprising one or more vector-derived sequences. In some embodiments, a cell transiently transfected with the components of a nucleic acid-targeting system as described herein (such as by transient transfection of one or more vectors, or transfection with RNA), and modified through the activity of a nucleic acid-targeting complex, is used to establish a new cell line comprising cells containing the modification but lacking any other exogenous sequence. In some embodiments, cells transiently or non-transiently transfected with one or more vectors described herein, or cell lines derived from such cells are used in assessing one or more test compounds.

[0593] In some embodiments, one or more vectors described herein are used to produce a non-human transgenic animal or transgenic plant. In some embodiments, the transgenic animal is a mammal, such as a mouse, rat, or rabbit. In certain embodiments, the organism or subject is a plant. In certain embodiments, the organism or subject or plant is algae. Methods for producing transgenic plants and animals are known in the art, and generally begin with a method of cell transfection, such as described herein.

[0594] In one aspect, the invention provides for methods of modifying a target polynucleotide in a eukaryotic cell. In some embodiments, the method comprises allowing a nucleic acid-targeting complex to bind to the target polynucleotide to effect cleavage of said target polynucleotide thereby modifying the target polynucleotide, wherein the nucleic acid-targeting complex comprises a nucleic acid-targeting effector protein complexed with a guide RNA hybridized to a target sequence within said target polynucleotide.

[0595] In one aspect, the invention provides a method of modifying expression of a polynucleotide in a eukaryotic cell. In some embodiments, the method comprises allowing a nucleic acid-targeting complex to bind to the polynucleotide such that said binding results in increased or decreased expression of said polynucleotide; wherein the nucleic acid-targeting complex comprises a nucleic acid-targeting effector protein complexed with a guide RNA hybridized to a target sequence within said polynucleotide.

### Cas13b Effector Protein Complexes can be Used in Plants

[0596] The Cas13b effector protein system(s) (e.g., single or multiplexed) can be used in conjunction with recent advances in crop genomics. The systems described herein can be used to perform efficient and cost effective plant gene or genome interrogation or editing or manipulation—for instance, for rapid investigation and/or selection and/or interrogations and/or comparison and/or manipulations and/or transformation of plant genes or genomes; e.g., to create, identify, develop, optimize, or confer trait(s) or characteristic(s) to plant(s) or to transform a plant genome. There can accordingly be improved production of plants, new plants with new combinations of traits or characteristics or new plants with enhanced traits. The Cas13b effector protein system(s) can be used with regard to plants in Site-Directed Integration (SDI) or Gene Editing (GE) or any Near Reverse Breeding (NRB) or Reverse Breeding (RB) techniques. Aspects of utilizing the herein described Cas13b effector protein systems may be analogous to the use of the CRISPR-Cas (e.g. CRISPR-Cas9) system in plants, and mention is made of the University of Arizona website “CRISPR-PLANT” (http://www.genome.arizona.edu/crispr/) (supported by Penn State and AGI). Embodiments of the invention can be used in genome editing in plants or where RNAi or similar genome editing techniques have been used previously; see, e.g., Nekrasov, “Plant genome editing made easy: targeted mutagenesis in model and crop plants using the CRISPR-Cas system,” Plant Methods 2013, 9:39 (doi:10.1186/1746-4811-9-39); Brooks, “Efficient gene editing in tomato in the first generation using the CRISPR-Cas9 system,” Plant Physiology September 2014 pp 114.247577; Shan, “Targeted genome modification of crop plants using a CRISPR-Cas system,” Nature Biotechnology 31, 686-688 (2013); Feng, “Efficient genome editing in plants using a CRISPR/Cas system,” Cell Research (2013) 23:1229-1232. doi:10.1038/cr.2013.114; published online 20 Aug. 2013; Xie, “RNA-guided genome editing in plants using a CRISPR-Cas system,” Mol Plant. 2013 November; 6(6):1975-83. doi: 10.1093/mp/sst119. Epub 2013 Aug. 17; Xu, “Gene targeting using the Agrobacterium tumefaciens-mediated CRISPR-Cas system in rice,” Rice 2014, 7:5 (2014), Zhou et al., “Exploiting SNPs for biallelic CRISPR mutations in the outcrossing woody perennial Populus reveals 4-coumarate: CoA ligase specificity and Redundancy,” New Phytologist (2015) (Forum) 1-4 (available online only at www.newphytologist.com); Caliando et al, “Targeted DNA degradation using a CRISPR device stably carried in the host genome, NATURE COMMUNICATIONS 6:6989, DOI: 10.1038/ncomms7989, www.nature.com/naturecommunications DOI: 10.1038/ncomms7989; U.S. Pat. No. 6,603,061-Agrobacterium-Mediated Plant Transformation Method; U.S. Pat. No. 7,868,149-Plant Genome Sequences and Uses Thereof and US 2009/0100536-Transgenic Plants with Enhanced Agronomic Traits, all the contents and disclosure of each of which are herein incorporated by reference in their entirety. In the practice of the invention, the contents and disclosure of Morrell et al “Crop genomics: advances and applications,” Nat Rev Genet. 2011 Dec. 29; 13(2):85-96; each of which is incorporated by reference herein including as to how herein embodiments may be used as to plants. Accordingly, reference herein to animal cells may also apply, mutatis mutandis, to plant cells unless otherwise apparent; and, the enzymes herein having reduced off-target effects and systems employing such enzymes can be used in plant applications, including those mentioned herein.

[0597] Sugano et al. (Plant Cell Physiol. 2014 March; 55(3):475-81. doi: 10.1093/pcp/pcu014. Epub 2014 Jan. 18) reports the application of CRISPR-Cas9 to targeted mutagenesis in the liverwort Marchantia polymorpha L., which has emerged as a model species for studying land plant evolution. The U6 promoter of M. polymorpha was identified and cloned to express the gRNA. The target sequence of the gRNA was designed to disrupt the gene encoding auxin response factor 1 (ARF1) in M. polymorpha. Using Agrobacterium-mediated transformation, Sugano et al. isolated stable mutants in the gametophyte generation of M. polymorpha. CRISPR-Cas9-based site-directed mutagenesis in vivo was achieved using either the Cauliflower mosaic virus 35S or M. polymorpha EFla promoter to express Cas9. Isolated mutant individuals showing an auxin-resistant phenotype were not chimeric. Moreover, stable mutants were produced by asexual reproduction of T1 plants. Multiple arf1 alleles were easily established using CRIPSR/Cas9-based targeted mutagenesis. The Cas13b systems of the present invention can be used to regulate the same as well as other genes, and like expression control systems such as RNAi and siRNA, the method of the invention can be inducible and reversible.

[0598] Kabadi et al. (Nucleic Acids Res. 2014 Oct. 29; 42(19):e147. doi: 10.1093/nar/gku749. Epub 2014 Aug. 13) developed a single lentiviral system to express a Cas9 variant, a reporter gene and up to four sgRNAs from independent RNA polymerase III promoters that are incorporated into the vector by a convenient Golden Gate cloning method. Each sgRNA was efficiently expressed and can mediate multiplex gene editing and sustained transcriptional activation in immortalized and primary human cells. The instant invention can be used to regulate the plant genes of Kabadi.

[0599] Xing et al. (BMC Plant Biology 2014, 14:327) developed a CRISPR-Cas9 binary vector set based on the pGreen or pCAMBIA backbone, as well as a gRNA. This toolkit requires no restriction enzymes besides Bsa1 to generate final constructs harboring maize-codon optimized Cas9 and one or more gRNAs with high efficiency in as little as one cloning step. The toolkit was validated using maize protoplasts, transgenic maize lines, and transgenic Arabidopsis lines and was shown to exhibit high efficiency and specificity. More importantly, using this toolkit, targeted mutations of three Arabidopsis genes were detected in transgenic seedlings of the T1 generation. Moreover, the multiple-gene mutations could be inherited by the next generation. (guide RNA) module vector set, as a toolkit for multiplex genome editing in plants. The Cas13b systems and proteins of the instant invention may be used to target the genes targeted by Xing.

[0600] The Cas13b CRISPR systems of the invention may be used in the detection of plant viruses. Gambino et al. (Phytopathology. 2006 November; 96(11):1223-9. doi: 10.1094/PHYTO-96-1223) relied on amplification and multiplex PCR for simultaneous detection of nine grapevine viruses. The Cas13b systems and proteins of the instant invention may similarly be used to detect multiple targets in a host. Moreover, the systems of the invention can be used to simultaneously knock down viral gene expression in valuable cultivars, and prevent activation or further infection by targeting expressed vial RNA.

[0601] Murray et al. (Proc Biol Sci. 2013 Jun. 26; 280(1765):20130965. doi: 10.1098/rspb.2013.0965; published 2013 Aug. 22) analyzxed 12 plant RNA viruses to investigatge evolutionary rates and found evidence of episodic selection possibly due to shifts between different host genotyopes or species. The Cas13b systems and proteins of the instant invention may be used to tarteg or immunize against such viruses in a host. For example, the systems of the invention can be used to block viral RNA expression hence replication. Also, the invention can be used to target nuclic acids for cleavage as wll as to target expression or activation. Moreover, the systems of the invention can be multiplexed so as to hit multiple targets or multiple isolate of the same virus.

[0602] Ma et al. (Mol Plant. 2015 Aug. 3; 8(8):1274-84. doi: 10.1016/j.molp.2015.04.007) reports robust CRISPR-Cas9 vector system, utilizing a plant codon optimized Cas9 gene, for convenient and high-efficiency multiplex genome editing in monocot and dicot plants. Ma et al. designed PCR-based procedures to rapidly generate multiple sgRNA expression cassettes, which can be assembled into the binary CRISPR-Cas9 vectors in one round of cloning by Golden Gate ligation or Gibson Assembly. With this system, Ma et al. edited 46 target sites in rice with an average 85.4% rate of mutation, mostly in biallelic and homozygous status. Ma et al. provide examples of loss-of-function gene mutations in T0 rice and T1 Arabidopsis plants by simultaneous targeting of multiple (up to eight) members of a gene family, multiple genes in a biosynthetic pathway, or multiple sites in a single gene. Similarly, the Cas13b systems of the instant invention can dffieicnelty target expression of multiple genes simultaneously.

[0603] Lowder et al. (Plant Physiol. 2015 Aug. 21. pii: pp. 00636.2015) also developed a CRISPR-Cas9 toolbox enables multiplex genome editing and transcriptional regulation of expressed, silenced or non-coding genes in plants. This toolbox provides researchers with a protocol and reagents to quickly and efficiently assemble functional CRISPR-Cas9 T-DNA constructs for monocots and dicots using Golden Gate and Gateway cloning methods. It comes with a full suite of capabilities, including multiplexed gene editing and transcriptional activation or repression of plant endogenous genes. T-DNA based transformation technology is fundamental to modern plant biotechnology, genetics, molecular biology and physiology. As such, we developed a method for the assembly of Cas9 (WT, nickase or dCas9) and gRNA(s) into a T-DNA destination-vector of interest. The assembly method is based on both Golden Gate assembly and MultiSite Gateway recombination. Three modules are required for assembly. The first module is a Cas9 entry vector, which contains promoterless Cas9 or its derivative genes flanked by attL1 and attR5 sites. The second module is a gRNA entry vector which contains entry gRNA expression cassettes flanked by attL5 and attL2 sites. The third module includes attR1-attR2-containing destination T-DNA vectors that provide promoters of choice for Cas9 expression. The toolbox of Lowder et al. may be applied to the Cas13b effector protein system of the present invention.

[0604] Organisms such as yeast and microalgae are widely used for synthetic biology. Stovicek et al. (Metab. Eng. Comm., 2015; 2:13 describes genome editing of industrial yeast, for example, Saccharomyces cerevisae, to efficiently produce robust strains for industrial production. Stovicek used a CRISPR-Cas9 system codon-optimized for yeast to simultaneously disrupt both alleles of an endogenous gene and knock in a heterologous gene. Cas9 and gRNA were expressed from genomic or episomal 2μ-based vector locations. The authors also showed that gene disruption efficiency could be improved by optimization of the levels of Cas9 and gRNA expression. Hlavová et al. (Biotechnol. Adv. 2015) discusses development of species or strains of microalgae using techniques such as CRISPR to target nuclear and chloroplast genes for insertional mutagenesis and screening. The same plasmids and vectors can be applied to the Cas13b systems of the instant invention.

[0605] Petersen (“Towards precisely glycol engineered plants,” Plant Biotech Denmark Annual meeting 2015, Copenhagen, Denmark) developed a method of using CRISPR/Cas9 to engineer genome changes in Arabidopsis, for example to glyco engineer Arabidopsis for production of proteins and products having desired posttranslational modifications. Hebelstrup et al. (Front Plant Sci. 2015 Apr. 23; 6:247) outlines in planta starch bioengineering, providing crops that express starch modifying enzymes and directly produce products that normally are made by industrial chemical and/or physical treatments of starches. The methods of Petersen and Hebelstrup may be applied to the Cas13b effector protein system of the present invention.

[0606] Kurth et al, J Virol. 2012 June; 86(11):6002-9. doi: 10.1128/JVI.00436-12. Epub 2012 Mar. 21) developed an RNA virus-based vector for the introduction of desired traits into grapevine without heritable modifications to the genome. The vector provided the ability to regulate expression of of endogenous genes by virus-induced gene silencing. The Cas13b systems and proteins of the instant invention can be used to silence genes and proteins without heritable modification to the genome.

[0607] In an embodiment, the plant may be a legume. The present invention may utilize the herein disclosed CRISPR-Cas system for exploring and modifying, for example, without limitation, soybeans, peas, and peanuts. Curtin et al. provides a toolbox for legume function genomics. (See Curtin et al., “A genome engineering toolbox for legume Functional genomics,” International Plant and Animal Genome Conference XXII 2014). Curtin used the genetic transformation of CRISPR to knock-out/down single copy and duplicated legume genes both in hairy root and whole plant systems. Some of the target genes were chosen in order to explore and optimize the features of knock-out/down systems (e.g., phytoene desaturase), while others were identified by soybean homology to Arabidopsis Dicer-like genes or by genome-wide association studies of nodulation in Medicago. The Cas13b systems and proteins of the instant invention can be used to knockout/knockdown systems.

[0608] Peanut allergies and allergies to legumes generally are a real and serious health concern. The Cas13b effector protein system of the present invention can be used to identify and then edit or silence genes encoding allergenic proteins of such legumes. Without limitation as to such genes and proteins, Nicolaou et al. identifies allergenic proteins in peanuts, soybeans, lentils, peas, lupin, green beans, and mung beans. See, Nicolaou et al., Current Opinion in Allergy and Clinical Immunology 2011; 11(3):222).

[0609] In an advantageous embodiment, the plant may be a tree. The present invention may also utilize the herein disclosed CRISPR Cas system for herbaceous systems (see, e.g., Belhaj et al., Plant Methods 9: 39 and Harrison et al., Genes & Development 28: 1859-1872). In a particularly advantageous embodiment, the CRISPR Cas system of the present invention may target single nucleotide polymorphisms (SNPs) in trees (see, e.g., Zhou et al., New Phytologist, Volume 208, Issue 2, pages 298-301, October 2015). In the Zhou et al. study, the authors applied a CRISPR Cas system in the woody perennial Populus using the 4-coumarate:CoA ligase (4CL) gene family as a case study and achieved 100% mutational efficiency for two 4CL genes targeted, with every transformant examined carrying biallelic modifications. In the Zhou et al., study, the CRISPR-Cas9 system was highly sensitive to single nucleotide polymorphisms (SNPs), as cleavage for a third 4CL gene was abolished due to SNPs in the target sequence. These methods may be applied to the Cas13b effector protein system of the present invention.

[0610] The methods of Zhou et al. (New Phytologist, Volume 208, Issue 2, pages 298-301, October 2015) may be applied to the present invention as follows. Two 4CL genes, 4CL1 and 4CL2, associated with lignin and flavonoid biosynthesis, respectively are targeted for CRISPR-Cas9 editing. The Populus tremula×alba clone 717-1B4 routinely used for transformation is divergent from the genome-sequenced Populus trichocarpa. Therefore, the 4CL1 and 4CL2 gRNAs designed from the reference genome are interrogated with in-house 717 RNA-Seq data to ensure the absence of SNPs which could limit Cas efficiency. A third gRNA designed for 4CL5, a genome duplicate of 4CL1, is also included. The corresponding 717 sequence harbors one SNP in each allele near/within the PAM, both of which are expected to abolish targeting by the 4CL5-gRNA. All three gRNA target sites are located within the first exon. For 717 transformation, the gRNA is expressed from the Medicago U6.6 promoter, along with a human codon-optimized Cas under control of the CaMV 35S promoter in a binary vector. Transformation with the Cas-only vector can serve as a control. Randomly selected 4CL1 and 4CL2 lines are subjected to amplicon-sequencing. The data is then processed and biallelic mutations are confirmed in all cases. These methods may be applied to the Cas13b effector protein system of the present invention.

[0611] In plants, pathogens are often host-specific. For example, Fusarium oxysporum f. sp. lycopersici causes tomato wilt but attacks only tomato, and F. oxysporum f. dianthii Puccinia graminis f sp. tritici attacks only wheat. Plants have existing and induced defenses to resist most pathogens. Mutations and recombination events across plant generations lead to genetic variability that gives rise to susceptibility, especially as pathogens reproduce with more frequency than plants. In plants there can be non-host resistance, e.g., the host and pathogen are incompatible. There can also be Horizontal Resistance, e.g., partial resistance against all races of a pathogen, typically controlled by many genes and Vertical Resistance, e.g., complete resistance to some races of a pathogen but not to other races, typically controlled by a few genes. In a Gene-for-Gene level, plants and pathogens evolve together, and the genetic changes in one balance changes in other. Accordingly, using Natural Variability, breeders combine most useful genes for Yield, Quality, Uniformity, Hardiness, Resistance. The sources of resistance genes include native or foreign Varieties, Heirloom Varieties, Wild Plant Relatives, and Induced Mutations, e.g., treating plant material with mutagenic agents. Using the present invention, plant breeders are provided with a new tool to induce mutations. Accordingly, one skilled in the art can analyze the genome of sources of resistance genes, and in Varieties having desired characteristics or traits employ the present invention to induce the rise of resistance genes, with more precision than previous mutagenic agents and hence accelerate and improve plant breeding programs.

[0612] Aside from the plants otherwise discussed herein and above, engineered plants modified by the effector protein and suitable guide, and progeny thereof, as provided. These may include disease or drought resistant crops, such as wheat, barley, rice, soybean or corn; plants modified to remove or reduce the ability to self-pollinate (but which can instead, optionally, hybridise instead); and allergenic foods such as peanuts and nuts where the immunogenic proteins have been disabled, destroyed or disrupted by targeting via a effector protein and suitable guide.

### Therapeutic Treatment

[0613] The system of the invention can be applied in areas of former RNA cutting technologies, without undue experimentation, from this disclosure, including therapeutic, assay and other applications, because the present application provides the foundation for informed engineering of the system. The present invention provides for therapeutic treatment of a disease caused by overexpression of RNA, toxic RNA and/or mutated RNA (such as, for example, splicing defects or truncations). Expression of the toxic RNA may be associated with formation of nuclear inclusions and late-onset degenerative changes in brain, heart or skeletal muscle. In the best studied example, myotonic dystrophy, it appears that the main pathogenic effect of the toxic RNA is to sequester binding proteins and compromise the regulation of alternative splicing (Hum. Mol. Genet. (2006) 15 (suppl 2): R162-R169). Myotonic dystrophy [dystrophia myotonica (DM)] is of particular interest to geneticists because it produces an extremely wide range of clinical features. A partial listing would include muscle wasting, cataracts, insulin resistance, testicular atrophy, slowing of cardiac conduction, cutaneous tumors and effects on cognition. The classical form of DM, which is now called DM type 1 (DM1), is caused by an expansion of CTG repeats in the 3′-untranslated region (UTR) of DMPK, a gene encoding a cytosolic protein kinase.

[0614] The below table presents a list of exons shown to have misregulated alternative splicing in DM1 skeletal muscle, heart or brain.

| | |
|---|---|
| Tissue/gene Target | Reference |

Skeletal muscle

| | | |
|---|---|---|
| ALP | ex 5a, 5b | Lin X., et al. Failure of MBNL1-dependent postnatal splicing |
| | | transitions in myotonic dystrophy. Hum. Mol. Genet 2006; |
| | | 15: 2087-2097 |
| CAPN3 | ex 16 | Lin X., et al. Failure of MBNL1-dependent postnatal splicing |
| | | transitions in myotonic dystrophy. Hum. Mol. Genet 2006; |
| | | 15: 2087-2097 |
| CLCN1 | int 2, ex 7a, 8a | Mankodi A., et al. Expanded CUG repeats trigger aberrant splicing of |
| | | ClC-1 chloride channel pre-mRNA and hyperexcitability of skeletal |
| | | muscle in myotonic dystrophy. Mol. Cell 2002; 10: 35-44 |
| | | Charlet-B N., et al. Loss of the muscle-specific chloride channel in |
| | | type 1 myotonic dystrophy due to misregulated alternative splicing. |
| | | Mol. Cell 2002; 10: 45-53 |
| FHOS | ex 11a | Lin X., et al. Failure of MBNL1-dependent postnatal splicing |
| | | transitions in myotonic dystrophy. Hum. Mol. Genet 2006; |
| | | 15: 2087-2097 |
| GFAT1 | ex 10 | Lin X., et al. Failure of MBNL1-dependent postnatal splicing |
| | | transitions in myotonic dystrophy. Hum. Mol. Genet 2006; |
| | | 15: 2087-2097 |
| IR | ex 11 | Savkur R. S., et al. Aberrant regulation of insulin receptor alternative |
| | | splicing is associated with insulin resistance in myotonic dystrophy. |
| | | Nat. Genet. 2001; 29: 40-47 |
| MBNL1 | ex 7 | Lin X., et al. Failure of MBNL1-dependent postnatal splicing |
| | | transitions in myotonic dystrophy. Hum. Mol. Genet 2006; |
| | | 15: 2087-2097 |
| MBNL2 | ex 7 | Lin X., et al. Failure of MBNL1-dependent postnatal splicing |
| | | transitions in myotonic dystrophy. Hum. Mol. Genet 2006; |
| | | 15: 2087-2097 |
| MTMR1 | ex 2.1, 2.2 | Buj-Bello A., et al. Muscle-specific alternative splicing of |
| | | myotubularin-related 1 gene is impaired in DM1 muscle cells. Hum. |
| | | Mol. Genet. 2002; 11: 2297-2307 |
| NRAP | ex 12 | Lin X., et al. Failure of MBNL1-dependent postnatal splicing |
| | | transitions in myotonic dystrophy. Hum. Mol. Genet 2006; |
| | | 15: 2087-2097 |
| RYR1 | ex 70 | Kimura T., et al. Altered mRNA splicing of the skeletal muscle |
| | | ryanodine receptor and sarcoplasmic/endoplasmic reticulum Ca2+- |
| | | ATPase in myotonic dystrophy type 1. Hum. Mol. Genet. |
| | | 2005; 14: 2189-2200 |
| SERCA1 | ex 22 | Kimura T., et al. Altered mRNA splicing of the skeletal muscle |
| | | ryanodine receptor and sarcoplasmic/endoplasmic reticulum Ca2+- |
| | | ATPase in myotonic dystrophy type 1. Hum. Mol. Genet. |
| | | 2005; 14: 2189-2200 |
| | | Lin X., et al. Failure of MBNL1-dependent postnatal splicing |
| | | transitions in myotonic dystrophy. Hum. Mol. Genet 2006; |
| | | 15: 2087-2097 |
| z-Titin | ex Zr4, Zr5 | Lin X., et al. Failure of MBNL1-dependent postnatal splicing |
| | | transitions in myotonic dystrophy. Hum. Mol. Genet 2006; |
| | | 15: 2087-2097 |
| m-Titin | M-line ex5 | Lin X., et al. Failure of MBNL1-dependent postnatal splicing |
| | | transitions in myotonic dystrophy. Hum. Mol. Genet 2006; |
| | | 15: 2087-2097 |
| TNNT3 | fetal ex | Kanadia R. N., et al. A muscleblind knockout model for myotonic |
| | | dystrophy. Science 2003; 302: 1978-1980 |
| ZASP | ex 11 | Lin X., et al. Failure of MBNL1-dependent postnatal splicing |
| | | transitions in myotonic dystrophy. Hum. Mol. Genet 2006; |
| | | 15: 2087-2097 |

Heart

| | | |
|---|---|---|
| TNNT2 | ex 5 | Philips A. V., et al. Disruption of splicing regulated by a CUG-binding |
| | | protein in myotonic dystrophy. Science 1998; 280: 737-741 |
| ZASP | ex 11 | Mankodi A., et al. Nuclear RNA foci in the heart in myotonic |
| | | dystrophy. Circ. Res. 2005; 97: 1152-1155 |
| m-Titin | M-line ex 5 | Mankodi A., et al. Nuclear RNA foci in the heart in myotonic |
| | | dystrophy. Circ. Res. 2005; 97: 1152-1155 |
| KCNAB1 | ex 2 | Mankodi A., et al. Nuclear RNA foci in the heart in myotonic |
| | | dystrophy. Circ. Res. 2005; 97: 1152-1155 |
| ALP | ex 5 | (Mankodi A., et al. Nuclear RNA foci in the heart in myotonic |
| | | dystrophy. Circ. Res. 2005; 97: 1152-1155 |

Brain

| | | |
|---|---|---|
| TAU | ex 2, ex 10 | Sergeant N., et al. Dysregulation of human brain microtubule- |
| | | associated tau mRNA maturation in myotonic dystrophy type 1. Hum. |
| | | Mol. Genet. 2001; 10: 2143-2155 |
| | | Jiang H., et al. Myotonic dystrophy type 1 associated with nuclear foci |
| | | of mutant RNA, sequestration of muscleblind proteins, and |
| | | deregulated alternative splicing in neurons. Hum. Mol. Genet. |
| | | 2004; 13: 3079-3088 |
| APP | ex 7 | Jiang H., et al. Myotonic dystrophy type 1 associated with nuclear foci |
| | | of mutant RNA, sequestration of muscleblind proteins, and |
| | | deregulated alternative splicing in neurons. Hum. Mol. Genet. |
| | | 2004; 13: 3079-3088 |
| NMDAR1 | ex 5 | Jiang H., et al. Myotonic dystrophy type 1 associated with nuclear foci |
| | | of mutant RNA, sequestration of muscleblind proteins, and |
| | | deregulated alternative splicing in neurons. Hum. Mol. Genet. |
| | | 2004; 13: 3079-3088 |

[0615] The enzymes of the present invention may target overexpressed RNA or toxic RNA, such as for example, the DMPK gene or any of the misregulated alternative splicing in DM1 skeletal muscle, heart or brain in, for example, the above table.

[0616] The enzymes of the present invention may also target trans-acting mutations affecting RNA-dependent functions that cause disease (summarized in Cell. 2009 Feb. 20; 136(4): 777-793) as indicated in the below table.

| DISEASE | GENE/MUTATION | FUNCTION |
|---|---|---|
| Prader Willi syndrome | SNORD116 | ribosome biogenesis |
| Spinal muscular atrophy | SMN2 | splicing |
| (SMA) | | |
| Dyskeratosis congenita | DKC1 | telomerase/ |
| (X-linked) | | translation |
| Dyskeratosis congenita | TERC | telomerase |
| (autosomal dominant) | | |
| Dyskeratosis congenita | TERT | telomerase |
| (autosomal dominant) | | |
| Diamond-Blackfan anemia | RPS19, RPS24 | ribosome biogenesis |
| Shwachman-Diamond | SBDS | ribosome biogenesis |
| syndrome | | |
| Treacher-Collins syndrome | TCOF1 | ribosome biogenesis |
| Prostate cancer | SNHG5 | ribosome biogenesis |
| Myotonic dystrophy, type 1 | DMPK (RNA gain-of- | protein kinase |
| (DM1) | function) | |
| Myotonic dystrophy type 2 | ZNF9 (RNA gain-of- | RNA binding |
| (DM2) | function) | |
| Spinocerebellar ataxia 8 | ATXN8/ATXN8OS | unknown/noncoding |
| (SCA8) | (RNA gain-of- | RNA |
| | function) | |
| Huntington's disease-like 2 | JPH3 (RNA gain-of- | ion channel |
| (HDL2) | function) | function |
| Fragile X-associated tremor | FMR1 (RNA gain-of- | translation/mRNA |
| ataxia syndrome (FXTAS) | function) | localization |
| Fragile X syndrome | FMR1 | translation/mRNA |
| | | localization |
| X-linked mental retardation | UPF3B | translation/nonsense |
| | | mediated decay |
| Oculopharyngeal muscular | PABPN1 | 3′ end formation |
| dystrophy (OPMD) | | |
| Human pigmentary | DSRAD | editing |
| genodermatosis | | |
| Retinitis pigmentosa | PRPF31 | splicing |
| Retinitis pigmentosa | PRPF8 | splicing |
| Retinitis pigmentosa | HPRP3 | splicing |
| Retinitis pigmentosa | PAP1 | splicing |
| Cartilage-hair hypoplasia | RMRP | splicing |
| (recessive) | | |
| Autism | 7q22-q33 locus | noncoding RNA |
| | breakpoint | |
| Beckwith-Wiedemann | H19 | noncoding RNA |
| syndrome (BWS) | | |
| Charcot-Marie-Tooth | GRS | translation |
| (CMT) Disease | | |
| Charcot-Marie-Tooth | YRS | translation |
| (CMT) Disease | | |
| Amyotrophic lateral | TARDBP | splicing, |
| sclerosis (ALS) | | transcription |
| Leukoencephalopathy with | EIF2B1 | translation |
| vanishing white matter | | |
| Wolcott-Rallison | EIF2AK3 | translation |
| syndrome | | (protease) |
| Mitochondrial myopathy | PUS1 | translation |
| and sideroblastic | | |
| anemia (MLASA) | | |
| Encephalomyopathy and | TSFM | translation |
| hypertrophic | | (mitochondrial) |
| cardiomyopathy | | |
| Hereditary spastic | SPG7 | ribosome biogenesis |
| paraplegia | | |
| Leukoencephalopathy | DARS2 | translation |
| | | (mitochondrial) |
| Susceptibility to | LARS2 | translation |
| diabetes mellitus | | (mitochondrial) |
| Deafness | MTRNR1 | ribosome biogenesis |
| | | (mitochondrial) |
| MELAS syndrome, | MTRNR2 | ribosome biogenesis |
| deafness | | (mitochondrial) |
| Cancer | SFRS1 | splicing, |
| | | translation, |
| | | export |
| Cancer | RBM5 | splicing |
| Multiple disorders | mitochondrial tRNA | translation |
| | mutations | (mitochondrial) |
| Cancer | miR-17-92 cluster | RNA interference |
| Cancer | miR-372/miR-373 | RNA interference |

[0617] The enzyme of the present invention may also be used in the treatment of various tauopathies, including primary and secondary tauopathies, such as primary age-related tauopathy (PART)/Neurofibrillary tangle-predominant senile dementia, with NFTs similar to AD, but without plaques, dementia pugilistica (chronic traumatic encephalopathy), progressive supranuclear palsy, corticobasal degeneration, frontotemporal dementia and parkinsonism linked to chromosome 17, lytico-Bodig disease (Parkinson-dementia complex of Guam), ganglioglioma and gangliocytoma, meningioangiomatosis, postencephalitic parkinsonism, subacute sclerosing panencephalitis, as well as lead encephalopathy, tuberous sclerosis, Hallervorden-Spatz disease, and lipofuscinosis, alzheimers disease. The enzymes of the present invention may also target mutations disrupting the cis-acting splicing code cause splicing defects and disease (summarized in Cell. 2009 Feb. 20; 136(4): 777-793). The motor neuron degenerative disease SMA results from deletion of the SMN1 gene. The remaining SMN2 gene has a C->T substitution in exon 7 that inactivates an exonic splicing enhancer (ESE), and creates an exonic splicing silencer (ESS), leading to exon 7 skipping and a truncated protein (SMNA7). A T->A substitution in exon 31 of the dystrophin gene simultaneously creates a premature termination codon (STOP) and an ESS, leading to exon 31 skipping. This mutation causes a mild form of DMD because the mRNA lacking exon 31 produces a partially functional protein. Mutations within and downstream of exon 10 of the MAPT gene encoding the tau protein affect splicing regulatory elements and disrupt the normal 1:1 ratio of mRNAs including or excluding exon 10. This results in a perturbed balance between tau proteins containing either four or three microtubule-binding domains (4R-tau and 3R-tau, respectively), causing the neuropathological disorder FTDP-17. The example shown is the N279K mutation which enhances an ESE function promoting exon 10 inclusion and shifting the balance toward increased 4R-tau. Polymorphic (UG)m(U)n tracts within the 3′ splice site of the CFTR gene exon 9 influence the extent of exon 9 inclusion and the level of full-length functional protein, modifying the severity of cystic fibrosis (CF) caused by a mutation elsewhere in the CFTR gene.

[0618] The innate immune system detects viral infection primarily by recognizing viral nucleic acids inside an infected cell, referred to as DNA or RNA sensing. In vitro RNA sensing assays can be used to detect specific RNA substrates. The RNA targeting effector protein can for instance be used for RNA-based sensing in living cells. Examples of applications are diagnostics by sensing of, for examples, disease-specific RNAs.

[0619] The RNA targeting effector protein of the invention can further be used for antiviral activity, in particular against RNA viruses. The effector protein can be targeted to the viral RNA using a suitable guide RNA selective for a selected viral RNA sequence. In particular, the effector protein may be an active nuclease that cleaves RNA, such as single stranded RNA. provided is therefore the use of an RNA targeting effector protein of the invention as an antiviral agent.

[0620] Therapeutic dosages of the enzyme system of the present invention to target RNA the above-referenced RNAs are contemplated to be about 0.1 to about 2 mg/kg the dosages may be administered sequentially with a monitored response, and repeated dosages if necessary, up to about 7 to 10 doses per patient. Advantageously, samples are collected from each patient during the treatment regimen to ascertain the effectiveness of treatment. For example, RNA samples may be isolated and quantified to determine if expression is reduced or ameliorated. Such a diagnostic is within the purview of one of skill in the art.

### Transcript Detection Methods

[0621] The effector proteins and systems of the invention are useful for specific detection of RNAs in a cell or other sample. In the presence of an RNA target of interest, guide-dependent Cas13b nuclease activity may be accompanied by non-specific RNAse activity against collateral targets. To take advantage of the RNase activity, all that is needed is a reporter substrate that can be detectably cleaved. For example, a reporter molecule can comprise RNA, tagged with a fluorescent reporter molecule (fluor) on one end and a quencher on the other. In the absence of Cas13b RNase activity, the physical proximity of the quencher dampens fluorescence from the fluor to low levels. When Cas13b target specific cleavage is activated by the presence of an RNA target-of-interest and suitable guide RNA, the RNA-containing reporter molecule is non-specifically cleaved and the fluor and quencher are spatially separated. This causes the fluor to emit a detectable signal when excited by light of the appropriate wavelength.

[0622] In an aspect, the invention relates to a (target) RNA detection system comprising an RNA targeting effector; one or more guide RNAs designed to bind to the corresponding RNA target; and an RNA-based cleavage inducible reporter construct. In another aspect, the invention relates to a method for (target) RNA detection in a sample, comprising adding an RNA targeting effector, one or more guide RNAs designed to bind to said (target) RNA, and an RNA-based cleavage inducible reporter construct to said sample. In a further aspect, the invention relates to a kit or device comprising the (target) RNA detection system as defined herein, or a kit or device comprising at least the RNA targeting effector and the RNA-based cleavage inducible reporter construct. In a further aspect, the invention relates to the use of the RNA targeting system or kit or device as defined herein for (target) RNA detection. The RNA targeting effector in certain embodiments is an RNA guided RNAse. In certain embodiments, the RNA targeting effector is is a CRISPR effector. In certain embodiments, the RNA targeting effector is a class 2 CRISPR effector. In certain embodiments, the RNA targeting effector is a class 2, type VI-B CRISPR effector. In a preferred embodiment, the RNA targeting effector is Cas13b. In certain embodiments, the RNA targeting effector, preferably Cas13b, is derived from a species as described herein elsewhere. It will be understood that the guide RNA designed to bind to said (target) RNA as described herein is capable of forming a complex with the RNA targeting effector and wherein the guide RNA in said complex is capable of binding to a target RNA molecule and whereby the target RNA is cleaved, as also described herein elsewhere. It will be understood that the guide RNA typically comprises a guide sequence and a direct repeat, as described herein elsewhere. In certain embodiments, the one or more guide RNAs are designed to bind to one or more target molecules that are diagnostic for a disease state. In certain embodiments, the disease state is infection, such as viral, bacterial, fungal, or parasitic infection. In certain embodiments, the disease state is characterised by aberrant (target) RNA expression. In certain embodiments, the disease state is cancer. In certain embodiments, the disease state is autoimmune disease. The RNA-based cleavage inducible reporter construct comprises RNA and cleavage of the RNA results in a detectable readout, i.e. a detectable signal is generated upon cleavage of the RNA. In certain embodiments, the RNA-based cleavage inducible reporter construct comprises a fluorochrome and a quencher. The skilled person will understand that different types of fluorochromes and corresponding quenchers may be used. The skilled person will readily envisage other types of inducible reporter systems which may be adapted for use in the present RNA cleavage reporter constructs.

[0623] In one exemplary assay method, Cas13b effector, target-of-interest-specific guide RNA, and reporter molecule are added to a cellular sample. An increase in fluorescence indicates the presence of the RNA target-of-interest. In another exemplary method, a detection array is provided. Each location of the array is provided with Cas13b effector, reporter molecule, and a target-of-interest-specific guide RNA. Depending on the assay to be performed, the target-of-interest-specific guide RNAs at each location of the array can be the same, different, or a combination thereof. Different target-of-interest-specific guide RNAs might be provided, for example when it is desired to test for one or more targets in a single source sample. The same target-of-interest-specific guide RNA might be provided at each location, for example when it is desired to test multiple samples for the same target.

[0624] As used herein, a “masking construct” refers to a molecule that can be cleaved or otherwise deactivated by an activated CRISPR system effector protein described herein. In certain example embodiments, the masking construct is a RNA-based masking construct. The masking construct prevents the generation or detection of a positive detectable signal. A positive detectable signal may be any signal that can be detected using optical, fluorescent, chemiluminescent, electrochemical or other detection methods known in the art. The masking construct may prevent the generation of a detectable positive signal or mask the presence of a detectable positive signal until the masking construct is removed or otherwise silenced. The term “positive detectable signal” is used to differentiate from other detectable signals that may be detectable in the presence of the masking construct. For example, in certain embodiments a first signal may be detected when the masking agent is present (i.e. a negative detectable signal), which then converts to a second signal (e.g. the positive detectable signal) upon detection of the target molecules and cleavage or deactivation of the masking agent by the activated CRISPR effector protein.

[0625] In certain example embodiments, the masking construct may suppress generation of a gene product. The gene product may be encoded by a reporter construct that is added to the sample. The masking construct may be an interfering RNA involved in a RNA interference pathway, such as a shRHN or siRNA. The masking construct may also comprise microRNA (miRNA). While present, the masking construct suppresses expression of the gene product. The gene product may be a fluorescent protein or other RNA transcript or proteins that would otherwise be detectable by a labeled probe or antibody but for the presence of the masking construct. Upon activation of the effector protein the masking construct is cleaved or otherwise silenced allowing for expression and detection of the gene product as the positive detectable signal.

[0626] In certain example embodiments, the masking construct may sequester one or more reagents needed to generate a detectable positive signal such that release of the one or more reagents from the masking construct results in generation of the detectable positive signal. The one or more reagents may combine to produce a colorimetric signal, a chemiluminescent signal, a fluorescent signal, or any other detectable signal and may comprise any reagents known to be suitable for such a purpose. In certain example embodiments, the one or more reagents are sequestered by RNA aptamers that bind the one or more reagents. The one or more reagents are released when the effector protein is activated upon detection of a target molecule. In certain example embodiments, the one or more reagents is a protein, such as an enzyme, capable of facilitating generation of a detectable signal, such as a colorimetric, chemiluminescent, or fluorescent signal, that is inhibited or sequestered such that the protein cannot generate the detectable signal by the binding of one or more RNA aptamers to the protein. Upon activation of the effector proteins disclosed herein, the RNA aptamers are cleaved or degraded to the extent they no longer inhibit the protein's ability to generate the detectable signal.

[0627] In one embodiment, thrombin is used as a signal amplification enzyme with an inhibitory aptamer, for example having the following sequence: GGGAACAAAGCUGAAGUACUUACCC (SEQ ID NO: 135). When this aptamer is cleaved, thrombin becomes active and will cleave a peptide colorimetric substrate (see, e.g., www.sigmaaldrich.com/catalog/product/sigma/t3068?lang=en&region=US) or fluorescent substrate (see, e.g., www.sigmaaldrich.com/catalog/product/sigma/b9385?lang=en&region=US). The colorimetric substrate, para-nitroanilide (pNA), is covalently linked to the peptide substrate for thrombin. Upon cleavage by thrombin, pNA is released and becomes yellow in color and easily visible by eye. The fluorescent substrate operates by a similar principle and, upon cleavage by thrombin, releases 7-amino-4-methylcoumarin, a blue fluorophore that can be detected using a fluorescence detector. Alternatives to thrombin include horseradish peroxidase (HRP), β-galactosidase, and calf alkaline phosphatase (CAP) which can similarly be used to generate a colorimetric or fluorescent signal, and be inhibited by an inhibitory aptamer.

[0628] In certain example embodiments, the masking construct may be immobilized on a solid substrate in an individual discrete volume (defined further below) and sequesters a single reagent. For example, the reagent may be a bead comprising a dye. When sequestered by the immobilized reagent, the individual beads are too diffuse to generate a detectable signal, but upon release from the masking construct are able to generate a detectable signal, for example by aggregation or simple increase in solution concentration. In certain example embodiments, the immobilized masking agent is a RNA-based aptamer that can be cleaved by the activated effector protein upon detection of a target molecule.

[0629] In certain other example embodiments, the masking construct binds to an immobilized reagent in solution thereby blocking the ability of the reagent to bind to a separate labeled binding partner that is free in solution. Thus, upon application of a washing step to a sample, the labeled binding partner can be washed out of the sample in the absence of a target molecule. However, if the effector protein is activated, the masking construct is cleaved to a degree sufficient to interfere with the ability of the masking construct to bind the reagent thereby allowing the labeled binding partner to bind to the immobilized reagent. Thus, the labeled binding partner remains after the wash step indicating the presence of the target molecule in the sample. In certain aspects, the masking construct that binds the immobilized reagent is a RNA aptamer. The immobilized reagent may be a protein and the labeled minding partner may be a labeled antibody. Alternatively, the immobilized reagent may be a streptavidin and the labeled binding partner may be labeled biotin. The label on the binding partner used in the above embodiments may be any detectable label known in the art. In addition, other known binding partners may be used in accordance with the overall design described here.

[0630] In certain example embodiments, the masking construct may comprise a ribozyme. Ribozymes are RNA molecules having catalytic properties. As ribozymes, both naturally and engineered, comprise or consist of RNA, that may be targeted by the effector proteins disclosed herein. The ribozyme may be selected or engineered to catalyze a reaction that either generates a negative detectable signal or prevents generation of a positive control signal. Upon deactivation of the ribozyme by the activated effector protein molecule the reaction generating a negative controls signal or preventing generation of a positive detectable signal is removed, thereby allowing a positive detectable signal to be detected. In one example embodiment, the ribozyme may catalyze a colorimetric reaction causing a solution to appear as a first color. When the ribozyme is deactivated the solution then turns to a second color, the second color being the detectable positive signal. An example of how ribozymes can be used to catalyze a colorimetric reaction are described in Zhao et al. “Signal amplification of glucosamine-6-phosphate based on ribozyme glmS,” Biosens Bioelectron. 2014; 16:337-42, and provide an example of how such a system could be modified to work in the context of the embodiments disclosed herein. Alternatively, ribozymes, when present can generate cleavage products of, for example, RNA transcripts. Thus, detection of a positive detectable signal may comprise detection of non-cleaved RNA transcripts that are only generated in the absence of the ribozyme.

[0631] In one example embodiment, the masking construct comprises a detection agent that changes color depending on whether the detection agent is aggregated or dispersed in solution. For example, certain nanoparticles, such as colloidal gold, undergo a visible purple to red color shift as they move from aggregates to dispersed particles. Accordingly, in certain example embodiments, such detection agents may be held in aggregate by one or more bridge molecules. At least a portion of the bridge molecule comprises RNA. Upon activation of the effector proteins disclosed herein, the RNA portion of the bridge molecule is cleaved allowing the detection agent to disperse and resulting in the corresponding change in color. In certain example embodiments the, bridge molecule is a RNA molecule. In certain example embodiments, the detection agent is a colloidal metal. The colloidal metal material may include water-insoluble metal particles or metallic compounds dispersed in a liquid, a hydrosol, or a metal sol. The colloidal metal may be selected from the metals in groups IA, IB, IIB and IIIB of the periodic table, as well as the transition metals, especially those of group VIII. Preferred metals include gold, silver, aluminum, ruthenium, zinc, iron, nickel and calcium. Other suitable metals also include the following in all of their various oxidation states: lithium, sodium, magnesium, potassium, scandium, titanium, vanadium, chromium, manganese, cobalt, copper, gallium, strontium, niobium, molybdenum, palladium, indium, tin, tungsten, rhenium, platinum, and gadolinium. The metals are preferably provided in ionic form, derived from an appropriate metal compound, for example the Al³⁺, Ru³⁺, Zn²⁺, Fe³⁺, Ni²⁺ and Ca²⁺ ions

[0632] In certain other example embodiments, the masking construct may comprise an RNA oligonucleotide to which are attached a detectable label and a masking agent of that detectable label. An example of such a detectable label/masking agent pair is a fluorophore and a quencher of the fluorophore. Quenching of the fluorophore can occur as a result of the formation of a non-fluorescent complex between the fluorophore and another fluorophore or non-fluorescent molecule. This mechanism is known as ground-state complex formation, static quenching, or contact quenching. Accordingly, the RNA oligonucleotide may be designed so that the fluorophore and quencher are in sufficient proximity for contact quenching to occur. Fluorophores and their cognate quenchers are known in the art and can be selected for this purpose by one having ordinary skill in the art. The particular fluorophore/quencher pair is not critical in the context of this invention, only that selection of the fluorophore/quencher pairs ensures masking of the fluorophore. Upon activation of the effector proteins disclosed herein, the RNA oligonucleotide is cleaved thereby severing the proximity between the fluorophore and quencher needed to maintain the contact quenching effect. Accordingly, detection of the fluorophore may be used to determine the presence of a target molecule in a sample.

[0633] In one example embodiment, the masking construct may comprise a quantum dot. The quantum dot may have multiple linker molecules attached to the surface. At least a portion of the linker molecule comprises RNA. The linker molecule is attached to the quantum dot at one end and to one or more quenchers along the length or at terminal ends of the linker such that the quenchers are maintained in sufficient proximity for quenching of the quantum dot to occur. The linker may be branched. As above, the quantum dot/quencher pair is not critical, only that selection of the quantum dot/quencher pair ensures masking of the fluorophore. Quantum dots and their cognate quenchers are known in the art and can be selected for this purpose by one having ordinary skill in the art. Upon activation of the effector proteins disclosed herein, the RNA portion of the linker molecule is cleaved thereby eliminating the proximity between the quantum dot and one or more quenchers needed to maintain the quenching effect. In one embodiment, the quantum dot is streptavidin conjugated, such as Qdot® 625 Streptavidin Conjugate (www.thermofisher.com/order/catalog/product/A10196). RNA are attached via biotin linkers and recruit quenching molecules, with the sequence /5Biosg/UCUCGUACGUUC/3IAbRQSp/ (SEQ ID NO: 136) or /5Biosg/UCUCGUACGUUCUCUCGUACGUUC/3IAbRQSp/ (SEQ ID NO: 137) where /5Biosg/is a biotin tag and/3IAbRQSp/ is an Iowa black quencher. Upon cleavage, the quencher will be released and the quantum dot will fluoresce visibly.

[0634] In a similar fashion, fluorescence energy transfer (FRET) may be used to generate a detectable positive signal. FRET is a non-radiative process by which a photon from an energetically excited fluorophore (i.e. “donor fluorophore”) raises the energy state of an electron in another molecule (i.e. “the acceptor”) to higher vibrational levels of the excited singlet state. The donor fluorophore returns to the ground state without emitting a fluoresce characteristic of that fluorophore. The acceptor can be another fluorophore or non-fluorescent molecule. If the acceptor is a fluorophore, the transferred energy is emitted as fluorescence characteristic of that fluorophore. If the acceptor is a non-fluorescent molecule the absorbed energy is loss as heat. Thus, in the context of the embodiments disclosed herein, the fluorophore/quencher pair is replaced with a donor fluorophore/acceptor pair attached to the oligonucleotide molecule. When intact, the masking construct generates a first signal (negative detectable signal) as detected by the fluorescence or heat emitted from the acceptor. Upon activation of the effector proteins disclosed herein the RNA oligonucleotide is cleaved and FRET is disrupted such that fluorescence of the donor fluorophore is now detected (positive detectable signal).

[0635] One mode of colorimetric readout for the detection of RNAses is based upon intercalating dyes, which change their absorbance in response to cleavage of long RNAs to short nucleotides. Several existing dyes with these properties exist. From Wagner (1983), Pyronine-Y will complex with RNA and form a complex that has an absorbance at 572 nm; cleavage of RNA results in loss of absorbance and a color change. Greiner-Stoeffele (1996) used methylene blue in a similar fashion, with changes in absorbance at 688 nm upon RNAse activity.

[0636] Another mode of colorimetric readout involves nucleic acid substrates that change color upon cleavage. Witmer (1991) utilized a synthetic ribonucleotide substrate, U-3′-BCIP, that releases a reporter group after cleavage, resulting in generation of absorbance at 650 nm.

### Deaminase Functionalized CRISPR/Cas13

[0637] In certain aspects and embodiments of the invention, the Cas13 protein as described herein (including for instance Cas13a, Cas13b, or Cas13c, including any orthologue such as those described herein elsewhere), including any Cas13 protein variant (such as functional variants, mutants (including but not limited to catalytically inactive mutants), (functional) domains or truncations (including split Cas13), Cas13 fusion proteins (e.g. comprising NLS or NES sequences or any other fusion proteins described herein elsewhere, etc) as described herein may be covalently or non-covalently associated or fused to a deaminase or a functional fragment thereof, such as a catalytically active fragment thereof. The deaminase may be an adenosine deaminase or a cytidine deaminase, preferably which deaminase is an RNA specific deaminase. The deaminase as described herein may be a truncated or mutated deaminase. It will be understood that whenever reference is made herein to adenosine deaminase, similar considerations apply to cytidine deaminase (and instead of deaminating adenine, cytidine is deaminated).

[0638] In certain aspects and embodiments, the invention relates to polynucleic acids encoding such Cas13-deaminase fusion proteins, which may advantageously be codon-optimized (or encoding separately Cas13 and deaminase in case of non-covalent linkage), as well as vectors and vector systems for propagation and/or expression, such as prokaryotic or eukaryotic propagation or expression. Exemplary polynucleic acids, and vectors are described herein elsewhere.

[0639] In certain aspects and embodiments, the invention relates to host cells (or progeny thereof), organs, or organisms (or off-spring thereof) comprising the proteins and/or polynucleotides or vectors or vector systems described above. Exemplary host cells/organs/organisms, as well as expression systems are described herein elsewhere.

[0640] In certain aspects and embodiments, the invention relates to systems, complexes, or compositions (including kits), such as pharmaceutical compositions, comprising such proteins, polynucleic acids, vectors or vector systems, host cells, organs, or organisms. Exemplary systems, complexes, or compositions, such as pharmaceutical compositions are described herein elsewhere. It will be understood that such systems, complexes, or compositions may further include a guide RNA, as described herein elsewhere, including any variant guide RNA (such as escorted, protected, dead guides, etc., including guided comprising aptamers).

[0641] In certain aspects and embodiments, the invention relates to uses of or methods involving the use of such proteins, polynucleic acids, vectors or vector systems, host cells, organs, organisms, systems, complexes, or compositions. Exemplary methods and uses are described herein elsewhere. In particular embodiments, the uses and methods involve modifying an Adenine or cytidine in a target RNA sequence of interest. In particular embodiments, the uses or methods are therapeutic or prophylactic, as also described herein elsewhere. Advantageously, the uses and methods may involve targeted base editing. In one aspect, the invention described herein provides methods for modifying an adenosine residue at a target locus with the aim of remedying and/or preventing a diseased condition that is or is likely to be caused by a G-to-A or C-to-T point mutation or a pathogenic single nucleotide polymorphism (SNP). Pathogenic G-to-A or C-to-T mutations/SNPs associated with various diseases affecting the brain and central nervous system are reported in the ClinVar database. According to the present invention, any of the mutations/SNPs can be targeted.

[0642] In general the systems disclosed herein comprise a targeting component and a base editing component. The targeting component functions to specifically target the base editing component to a target nucleotide sequence in which one or more nucleotides are to be edited. The base editing component may then catalyze a chemical reaction to convert a first nucleotide in the target sequence to a second nucleotide. For example, the base editor may catalyze conversion of an adenine such that it is read as guanine by a cell's transcription or translation machinery, or vice versa. Likewise, the base editing component may catalyze conversion of cytidine to a uracil, or vice versa. In certain example embodiments, the base editor may be derived by starting with a known base editor, such as an adenine deaminase or cytodine deaminase, and modified using methods such as directed evolution to derive new functionalities. Directed evolution techniques are known in the art and may include those described in WO 2015/184016 “High-Throughput Assembly of Genetic Permutations.”

[0643] In an aspect, the invention relates to a (fusion) protein or protein complex, or (a) polynucleotide(s) (including vectors and vector systems) encoding such, comprising (a) a catalytically inactive (dead) Cas13 protein; and (b) an (adenosine) deaminase protein or catalytic domain thereof; wherein said (adenosine) deaminase protein or catalytic domain thereof is covalently or non-covalently linked to said dead Cas13 protein or is adapted to link thereto after delivery. In certain embodiments, the (fusion) protein or protein complex can bind or is adapted to bind to a guide molecule which comprises a guide sequence linked to a direct repeat sequence; wherein guide molecule forms a complex with said dead Cas13 protein and directs said complex to bind said target RNA sequence of interest, wherein said guide sequence is capable of hybridizing with a target sequence comprising said Adenine to form an RNA duplex, wherein said guide sequence comprises a non-pairing Cytosine at a position corresponding to said Adenine resulting in an A-C mismatch in the RNA duplex formed; wherein said (adenosine) deaminase protein or catalytic domain thereof deaminates said Adenine in said RNA duplex.

[0644] In an aspect, the invention relates to a composition, complex, or system comprising (a) a catalytically inactive (dead) Cas13 protein; (b) a guide molecule which comprises a guide sequence linked to a direct repeat sequence; and (c) an (adenosine) deaminase protein or catalytic domain thereof; wherein said (adenosine) deaminase protein or catalytic domain thereof is covalently or non-covalently linked to said dead Cas13 protein or said guide molecule or is adapted to link thereto after delivery; wherein guide molecule forms a complex with said dead Cas13 protein and directs said complex to bind said target RNA sequence of interest, wherein said guide sequence is capable of hybridizing with a target sequence comprising said Adenine to form an RNA duplex, wherein said guide sequence comprises a non-pairing Cytosine at a position corresponding to said Adenine resulting in an A-C mismatch in the RNA duplex formed; wherein said (adenosine) deaminase protein or catalytic domain thereof deaminates said Adenine in said RNA duplex. The invention additionally relates to an engineered, non-naturally occurring (vector) system suitable for modifying an Adenine in a target locus of interest, comprising: a guide molecule which comprises a guide sequence, or a nucleotide sequence encoding the guide molecule; a CRISPR-Cas protein, or one or more nucleotide sequences encoding the CRISPR-Cas protein; an (adenosine) deaminase protein or catalytic domain thereof, or one or more nucleotide sequences encoding; wherein the (adenosine) deaminase protein or catalytic domain thereof is covalently or non-covalently linked to the CRISPR-Cas protein or the guide molecule or is adapted to link thereto after delivery; wherein the guide sequence is capable of hybridizing with a target sequence comprising an Adenine within an RNA polynucleotide of interest, but comprises a Cytosine at the position corresponding to the Adenine.

[0645] In an aspect, the invention relates to an engineered, non-naturally occurring vector system suitable for modifying an Adenine in a target locus of interest, comprising one or more vectors comprising: (a) a first regulatory element operably linked to a nucleotide sequence encoding said guide molecule which comprises said guide sequence, (b) a second regulatory element operably linked to a nucleotide sequence encoding said catalytically inactive Cas13 protein; and (c) a nucleotide sequence encoding an (adenosine) deaminase protein or catalytic domain thereof which is under control of said first or second regulatory element or operably linked to a third regulatory element; wherein, if said nucleotide sequence encoding an (adenosine) deaminase protein or catalytic domain thereof is operably linked to a third regulatory element, said (adenosine) deaminase protein or catalytic domain thereof is adapted to link to said guide molecule or said Cas13 protein after expression; wherein components (a), (b) and (c) are located on the same or different vectors of the system.

[0646] In an aspect, the invention relates to a method of modifying an Adenine in a target RNA sequence of interest. In particular embodiments, the method comprises delivering to said target RNA: (a) a catalytically inactive (dead) Cas13 protein; (b) a guide molecule which comprises a guide sequence linked to a direct repeat sequence; and (c) an (adenosine) deaminase protein or catalytic domain thereof; wherein said (adenosine) deaminase protein or catalytic domain thereof is covalently or non-covalently linked to said dead Cas13 protein or said guide molecule or is adapted to link thereto after delivery; wherein guide molecule forms a complex with said dead Cas13 protein and directs said complex to bind said target RNA sequence of interest, wherein said guide sequence is capable of hybridizing with a target sequence comprising said Adenine to form an RNA duplex, wherein said guide sequence comprises a non-pairing Cytosine at a position corresponding to said Adenine resulting in an A-C mismatch in the RNA duplex formed; wherein said (adenosine) deaminase protein or catalytic domain thereof deaminates said Adenine in said RNA duplex.

[0647] The invention further relates to a method for cell therapy, comprising administering to a patient in need thereof the modified cell described herein, wherein the presence of the modified cell remedies a disease in the patient. In one embodiment, the modified cell for cell therapy is a CAR-T cell capable of recognizing and/or attacking a tumor cell. In another embodiment, the modified cell for cell therapy is a stem cell, such as a neural stem cell, a mesenchymal stem cell, a hematopoietic stem cell, or an iPSC cell.

[0648] The invention also relates to a method for knocking-out or knocking-down an undesirable activity of a gene, wherein the deamination of the A at the transcript of the gene results in a loss of function. For example, in one embodiment, the targeted deamination by the deaminase-functionalized CRISPR system can cause a nonsense mutation resulting in a premature stop codon in an endogenous gene. This may alter the expression of the endogenous gene and can lead to a desirable trait in the edited cell. In another embodiment, the targeted deamination by the deaminase-functionalized CRISPR system can cause a non-conservative missense mutation resulting in a code for a different amino acid residue in an endogenous gene. This may alter the function of the endogenous gene expressed and can also lead to a desirable trait in the edited cell.

[0649] The deaminase-functionalized CRISPR system described herein can be used to target a specific Adenine within an RNA polynucleotide sequence for deamination. For example, the guide molecule can form a complex with the CRISPR-Cas protein and directs the complex to bind a target RNA sequence in the RNA polynucleotide of interest. Because the guide sequence is designed to have a non-pairing C, the RNA duplex formed between the guide sequence and the target sequence comprises an A-C mismatch, which directs the (adenosine) deaminase to contact and deaminate the A opposite to the non-pairing C, converting it to a Inosine (I). Since Inosine (I) base pairs with C and functions like G in cellular process, the targeted deamination of A described herein are useful for correction of undesirable G-A and C-T mutations, as well as for obtaining desirable A-G and T-C mutations.

[0650] In certain example embodiment the Cas13 protein is Cas13a, Cas13b or Cas 13c.

[0651] The (adenosine) deaminase protein or catalytic domain thereof may be fused to N- or C-terminus of said dead Cas13 protein. In certain example embodiments, the (adenosine) deaminase protein or catalytic domain thereof is fused to said dead Cas13 protein by a linker. The linker may be (GGGGS)₃₋₁₁ (SEQ ID NOS: 138-143), GSG₅ (SEQ ID NO: 144) or LEPGEKPYKCPECGKSFSQSGALTRHQRTHTR (SEQ ID NO: 145).

[0652] In certain example embodiments, the (adenosine) deaminase protein or catalytic domain thereof is linked to an adaptor protein and said guide molecule or said dead Cas13 protein comprises an aptamer sequence capable of binding to said adaptor protein. The adaptor sequence may be selected from MS2, PP7, Qβ, F2, GA, fr, JP501, M12, R17, BZ13, JP34, JP500, KU1, M11, MX1, TW18, VK, SP, FI, ID2, NL95, TW19, AP205, ϕCb5, ϕCb8r, ϕCb12r, ϕCb23r, 7s and PRR1.

[0653] In certain example embodiments, the (adenosine) deaminase protein or catalytic domain thereof is inserted into an internal loop of said dead Cas13 protein. In certain example embodiments, the Cas13a protein comprises one or more mutations in the two HEPN domains, particularly at position R474 and R1046 of Cas 13a protein originating from Leptotrichia wadei or amino acid positions corresponding thereto of a Cas13a ortholog.

[0654] In certain example embodiments, the Cas 13 protein is a Cas13b proteins, and the Cas13b comprises a mutation in one or more of positions R116, H121, R1177, H1182 of Cas13b protein originating from Bergeyella zoohelcum ATCC 43767 or amino acid positions corresponding thereto of a Cas13b ortholog. In certain other example embodiments, the mutation is one or more of R116A, H121A, R1177A, H1182A of Cas13b protein originating from Bergeyella zoohelcum ATCC 43767 or amino acid positions corresponding thereto of a Cas13b ortholog.

[0655] In certain example embodiments, the guide sequence has a length of about 29-53 nt capable of forming said RNA duplex with said target sequence. In certain other example embodiments, the guide sequence has a length of about 40-50 nt capable of forming said RNA duplex with said target sequence. In certain example embodiments, the distance between said non-pairing C and the 5′ end of said guide sequence is 20-30 nucleotides.

[0656] In certain example embodiments, the (adenosine) deaminase protein or catalytic domain thereof is a human, cephalopod, or Drosophila (adenosine) deaminase protein or catalytic domain thereof. In certain example embodiments, the (adenosine) deaminase protein or catalytic domain thereof has been modified to comprise a mutation at glutamic acid⁴⁸⁸ of the hADAR2-D amino acid sequence, or a corresponding position in a homologous ADAR protein. In certain example embodiments, the glutamic acid residue may be at position 488 or a corresponding position in a homologous ADAR protein is replaced by a glutamine residue (E488Q).

[0657] In certain other example embodiments, the (adenosine) deaminase protein or catalytic domain thereof is a mutated hADAR2d comprising mutation E488Q or a mutated hADARld comprising mutation El 008Q.

[0658] In certain example embodiments, the guide sequence comprises more than one mismatch corresponding to different adenosine sites in the target RNA sequence or wherein two guide molecules are used, each comprising a mismatch corresponding to a different adenosine sites in the target RNA sequence.

[0659] In certain example embodiments, the Cas13 protein and optionally said (adenosine) deaminase protein or catalytic domain thereof comprise one or more heterologous nuclear localization signal(s) (NLS(s)).

[0660] In certain example embodiments, the method further comprises, determining the target sequence of interest and selecting an (adenosine) deaminase protein or catalytic domain thereof which most efficiently deaminates said Adenine present in then target sequence.

[0661] The target RNA sequence of interest may be within a cell. The cell may be a eukaryotic cell, a non-human animal cell, a human cell, a plant cell. The target locus of interest may be within an animal or plant.

[0662] The target RNA sequence of interest may comprise in an RNA polynucleotide in vitro.

[0663] The components of the systems described herein may be delivered to said cell as a ribonucleoprotein complex or as one or more polynucleotide molecules, or any other delivery method as described herein elsewhere, including viral or non-viral delivery. The one or more polynucleotide molecules may comprise one or more mRNA molecules encoding the components. The one or more polynucleotide molecules may be comprised within one or more vectors. The one or more polynucleotide molecules may further comprise one or more regulatory elements operably configured to express said Cas13 protein, said guide molecule, and said deaminase protein or catalytic domain thereof, optionally wherein said one or more regulatory elements comprise inducible promoters. The one or more polynucleotide molecules or said ribonucleoprotein complex may be delivered via particles, vesicles, or one or more viral vectors. The particles may comprise a lipid, a sugar, a metal or a protein. The particles may comprise lipid nanoparticles. The vesicles may comprise exosomes or liposomes. The one or more viral vectors may comprise one or more of adenovirus, one or more lentivirus or one or more adeno-associated virus.

[0664] The methods disclosed herein may be used to modify a cell, a cell line or an organism by manipulation of one or more target RNA sequences.

[0665] In certain example embodiments, the deamination of said Adenine in said target RNA of interest remedies a disease caused by transcripts containing a pathogenic G→A or C→T point mutation.

[0666] The methods may be be used to treat or prevent a disease, or otherwise alleviate a disease or the severity of a disease, such as in particular by the targeted deamination using the deaminase-functionalized CRISPR system, wherein the deamination of the A, which remedies a disease caused by transcripts containing a pathogenic G→A or C→T point mutation. In certain example embodiments, the disease is selected from Meier-Gorlin syndrome, Seckel syndrome 4, Joubert syndrome 5, Leber congenital amaurosis 10; Charcot-Marie-Tooth disease, type 2; Charcot-Marie-Tooth disease, type 2; Usher syndrome, type 2C; Spinocerebellar ataxia 28; Spinocerebellar ataxia 28; Spinocerebellar ataxia 28; Long QT syndrome 2; Sjögren-Larsson syndrome; Hereditary fructosuria; Hereditary fructosuria; Neuroblastoma; Neuroblastoma; Kallmann syndrome 1; Kallmann syndrome 1; Kallmann syndrome 1; Metachromatic leukodystrophy, Rett syndrome, Amyotrophic lateral sclerosis type 10, Li-Fraumeni syndrome. The disease may be a premature termination disease.

[0667] The methods disclosed herein, may be used to make a modification that affects the fertility of an organism. The modification may affects splicing of said target RNA sequence. The modification may introduce a mutation in a transcript introducing an amino acid change and causing expression of a new antigen in a cancer cell.

[0668] In certain example embodiments, the target RNA may be a microRNA or comprised within a microRNA. In certain example embodiments, the deamination of said Adenine in said target RNA of interest causes a gain of function or a loss of function of a gene. In certain example embodiments, the gene is a gene expressed by a cancer cell.

[0669] In another aspect, the invention comprises a modified cell or progeny thereof that is obtained using the methods disclosed herein, wherein said cell comprises a hypoxanthine or a guanine in replace of said Adenine in said target RNA of interest compared to a corresponding cell not subjected to the method. The modified cell or progeny thereof may be a eukaryotic cell an animal cell, a human cell, a therapeutic T cell, an antibody-producing B cell, a plant cell.

[0670] In another aspect, the invention comprises a non-human animal comprising said modified cell or progeny thereof. The modified may be a plant cell.

[0671] In another aspect, the invention comprises a method for cell therapy, comprising administering to a patient in need thereof the modified cells disclosed herein, wherein the presence of said modified cell remedies a disease in the patient.

[0672] In another aspect, the invention is directed to an engineered, non-naturally occurring system suitable for modifying an Adenine in a target locus of interest, comprising A) a guide molecule which comprises a guide sequence linked to a direct repeat sequence, or a nucleotide sequence encoding said guide molecule; B) a catalytically inactive Cas13 protein, or a nucleotide sequence encoding said catalytically inactive Cas13 protein; C) an (adenosine) deaminase protein or catalytic domain thereof, or a nucleotide sequence encoding said (adenosine) deaminase protein or catalytic domain thereof; wherein said (adenosine) deaminase protein or catalytic domain thereof is covalently or non-covalently linked to said Cas13 protein or said guide molecule or is adapted to link thereto after delivery; wherein said guide sequence is capable of hybridizing with a target RNA sequence comprising an Adenine to form an RNA duplex, wherein said guide sequence comprises a non-pairing Cytosine at a position corresponding to said Adenine resulting in an A-C mismatch in the RNA duplex formed.

[0673] In another aspect, the invention is directed to an engineered, non-naturally occurring vector system suitable for modifying an Adenine in a target locus of interest, comprising the nucleotide sequences of a), b) and ca

[0674] In another aspect, the invention is directed to an engineered, non-naturally occurring vector system, comprising one or more vectors comprising: a first regulatory element operably linked to a nucleotide sequence encoding said guide molecule which comprises said guide sequence, a second regulatory element operably linked to a nucleotide sequence encoding said catalytically inactive Cas13 protein; and a nucleotide sequence encoding an (adenosine) deaminase protein or catalytic domain thereof which is under control of said first or second regulatory element or operably linked to a third regulatory element; wherein, if said nucleotide sequence encoding an (adenosine) deaminase protein or catalytic domain thereof is operably linked to a third regulatory element, said (adenosine) deaminase protein or catalytic domain thereof is adapted to link to said guide molecule or said Cas13 protein after expression; wherein components A), B) and C) are located on the same or different vectors of the system.

[0675] In another aspect, the invention is directed to in vitro or ex vivo host cell or progeny thereof or cell line or progeny thereof comprising the systems disclosed herein. The host cell or progeny thereof may be a a eukaryotice cell, an animal cell, a human cell, or a plant cell.

[0676] In one aspect the present invention provides methods for targeted deamination of adenine in RNA, more particularly in an RNA sequence of interest. According to the methods of the invention, the (adenosine) deaminase (AD) protein is recruited specifically to the relevant Adenine in the RNA sequence of interest by a CRISPR-Cas complex which can specifically bind to a target sequence. In order to achieve this, the (adenosine) deaminase protein can either be covalently linked to the CRISPR-Cas enzyme or be provided as a separate protein, but adapted so as to ensure recruitment thereof to the CRISPR-Cas complex.

[0677] In particular embodiments, of the methods of the present invention, recruitment of the (adenosine) deaminase to the target locus is ensured by fusing the (adenosine) deaminase or catalytic domain thereof to the CRISPR-Cas protein, which is a Cas13 protein. Methods of generating a fusion protein from two separate proteins are known in the art and typically involve the use of spacers or linkers. The Cas13 protein can be fused to the (adenosine) deaminase protein or catalytic domain thereof on either the N- or C-terminal end thereof. In particular embodiments, the CRISPR-Cas protein is an inactive or dead Cas13 protein and is linked to the N-terminus of the deaminase protein or its catalytic domain.

[0678] The term “adenosine deaminase” or “adenosine deaminase protein” as used herein refers to a protein, a polypeptide, or one or more functional domain(s) of a protein or a polypeptide that is capable of catalyzing a hydrolytic deamination reaction that converts an adenine (or an adenine moiety of a molecule) to a hypoxanthine (or a hypoxanthine moiety of a molecule), as shown below. In some embodiments, the adenine-containing molecule is an adenosine (A), and the hypoxanthine-containing molecule is an inosine (I). The adenine-containing molecule can be deoxyribonucleic acid (DNA) or ribonucleic acid (RNA).

[chemical structure]

[0679] According to the present disclosure, adenosine deaminases that can be used in connection with the present disclosure include, but are not limited to, members of the enzyme family known as adenosine deaminases that act on RNA (ADARs), members of the enzyme family known as adenosine deaminases that act on tRNA (ADATs), and other adenosine deaminase domain-containing (ADAD) family members. According to the present disclosure, the adenosine deaminase is capable of targeting adenine in a RNA/DNA and RNA duplexes. Indeed, Zheng et al. (Nucleic Acids Res. 2017, 45(6): 3369-3377) demonstrate that ADARs can carry out adenosine to inosine editing reactions on RNA/DNA and RNA/RNA duplexes. In particular embodiments, the adenosine deaminase has been modified to increase its ability to edit DNA in a RNA/DNAn RNA duplex as detailed herein below.

[0680] In some embodiments, the adenosine deaminase is derived from one or more metazoa species, including but not limited to, mammals, birds, frogs, squids, fish, flies and worms. In some embodiments, the adenosine deaminase is a human, squid or Drosophila adenosine deaminase.

[0681] In some embodiments, the adenosine deaminase is a human ADAR, including hADAR1, hADAR2, hADAR3. In some embodiments, the adenosine deaminase is a Caenorhabditis elegans ADAR protein, including ADR-1 and ADR-2. In some embodiments, the adenosine deaminase is a Drosophila ADAR protein, including dAdar. In some embodiments, the adenosine deaminase is a squid Loligo pealeii ADAR protein, including sqADAR2a and sqADAR2b. In some embodiments, the adenosine deaminase is a human ADAT protein. In some embodiments, the adenosine deaminase is a Drosophila ADAT protein. In some embodiments, the adenosine deaminase is a human ADAD protein, including TENR (hADAD1) and TENRL (hADAD2).

[0682] In some embodiments, the adenosine deaminase protein recognizes and converts one or more target adenosine residue(s) in a double-stranded nucleic acid substrate into inosine residues (s). In some embodiments, the double-stranded nucleic acid substrate is a RNA-DNA hybrid duplex. In some embodiments, the adenosine deaminase protein recognizes a binding window on the double-stranded substrate. In some embodiments, the binding window contains at least one target adenosine residue(s). In some embodiments, the binding window is in the range of about 3 bp to about 100 bp. In some embodiments, the binding window is in the range of about 5 bp to about 50 bp. In some embodiments, the binding window is in the range of about 10 bp to about 30 bp. In some embodiments, the binding window is about 1 bp, 2 bp, 3 bp, 5 bp, 7 bp, 10 bp, 15 bp, 20 bp, 25 bp, 30 bp, 40 bp, 45 bp, 50 bp, 55 bp, 60 bp, 65 bp, 70 bp, 75 bp, 80 bp, 85 bp, 90 bp, 95 bp, or 100 bp.

[0683] In some embodiments, the adenosine deaminase protein comprises one or more deaminase domains. Not intended to be bound by theory, it is contemplated that the deaminase domain functions to recognize and convert one or more target adenosine (A) residue(s) contained in a double-stranded nucleic acid substrate into inosine (I) residues (s). In some embodiments, the deaminase domain comprises an active center. In some embodiments, the active center comprises a zinc ion. In some embodiments, during the A-to-I editing process, base pairing at the target adenosine residue is disrupted, and the target adenosine residue is “flipped” out of the double helix to become accessible by the adenosine deaminase. In some embodiments, amino acid residues in or near the active center interact with one or more nucleotide(s) 5′ to a target adenosine residue. In some embodiments, amino acid residues in or near the active center interact with one or more nucleotide(s) 3′ to a target adenosine residue. In some embodiments, amino acid residues in or near the active center further interact with the nucleotide complementary to the target adenosine residue on the opposite strand. In some embodiments, the amino acid residues form hydrogen bonds with the 2′ hydroxyl group of the nucleotides.

[0684] In some embodiments, the adenosine deaminase comprises human ADAR2 full protein (hADAR2) or the deaminase domain thereof (hADAR2-D). In some embodiments, the adenosine deaminase is an ADAR family member that is homologous to hADAR2 or hADAR2-D.

[0685] Particularly, in some embodiments, the homologous ADAR protein is human ADAR1 (hADAR1) or the deaminase domain thereof (hADAR1-D). In some embodiments, glycine 1007 of hADAR1-D corresponds to glycine 487 hADAR2-D, and glutamic Acid 1008 of hADAR1-D corresponds to glutamic acid 488 of hADAR2-D.

[0686] In some embodiments, the adenosine deaminase comprises the wild-type amino acid sequence of hADAR2-D. In some embodiments, the adenosine deaminase comprises one or more mutations in the hADAR2-D sequence, such that the editing efficiency, and/or substrate editing preference of hADAR2-D is changed according to specific needs.

[0687] Certain mutations of hADAR1 and hADAR2 proteins have been described in Kuttan et al., Proc Natl Acad Sci USA. (2012) 109(48):E3295-304; Want et al. ACS Chem Biol. (2015) 10(11):2512-9; and Zheng et al. Nucleic Acids Res. (2017) 45(6):3369-337, each of which is incorporated herein by reference in its entirety.

[0688] In some embodiments, the adenosine deaminase comprises a mutation at glycine336 of the hADAR2-D amino acid sequence, or a corresponding position in a homologous ADAR protein. In some embodiments, the glycine residue at position 336 is replaced by an aspartic acid residue (G336D).

[0689] In some embodiments, the adenosine deaminase comprises a mutation at Glycine487 of the hADAR2-D amino acid sequence, or a corresponding position in a homologous ADAR protein. In some embodiments, the glycine residue at position 487 is replaced by a non-polar amino acid residue with relatively small side chains. For example, in some embodiments, the glycine residue at position 487 is replaced by an alanine residue (G487A). In some embodiments, the glycine residue at position 487 is replaced by a valine residue (G487V). In some embodiments, the glycine residue at position 487 is replaced by an amino acid residue with relatively large side chains. In some embodiments, the glycine residue at position 487 is replaced by a arginine residue (G487R). In some embodiments, the glycine residue at position 487 is replaced by a lysine residue (G487K). In some embodiments, the glycine residue at position 487 is replaced by a tryptophan residue (G487W). In some embodiments, the glycine residue at position 487 is replaced by a tyrosine residue (G487Y).

[0690] In some embodiments, the adenosine deaminase comprises a mutation at glutamic acid 488 of the hADAR2-D amino acid sequence, or a corresponding position in a homologous ADAR protein. In some embodiments, the glutamic acid residue at position 488 is replaced by a glutamine residue (E488Q). In some embodiments, the glutamic acid residue at position 488 is replaced by a histidine residue (E488H). In some embodiments, the glutamic acid residue at position 488 is replace by an arginine residue (E488R). In some embodiments, the glutamic acid residue at position 488 is replace by a lysine residue (E488K). In some embodiments, the glutamic acid residue at position 488 is replace by an asparagine residue (E488N). In some embodiments, the glutamic acid residue at position 488 is replace by an alanine residue (E488A). In some embodiments, the glutamic acid residue at position 488 is replace by a Methionine residue (E488M). In some embodiments, the glutamic acid residue at position 488 is replace by a serine residue (E488S). In some embodiments, the glutamic acid residue at position 488 is replace by a phenylalanine residue (E488F). In some embodiments, the glutamic acid residue at position 488 is replace by a lysine residue (E488L). In some embodiments, the glutamic acid residue at position 488 is replace by a tryptophan residue (E488W).

[0691] In some embodiments, the adenosine deaminase comprises a mutation at threonine 490 of the hADAR2-D amino acid sequence, or a corresponding position in a homologous ADAR protein. In some embodiments, the threonine residue at position 490 is replaced by a cysteine residue (T490C). In some embodiments, the threonine residue at position 490 is replaced by a serine residue (T490S). In some embodiments, the threonine residue at position 490 is replaced by an alanine residue (T490A). In some embodiments, the threonine residue at position 490 is replaced by a phenylalanine residue (T490F). In some embodiments, the threonine residue at position 490 is replaced by a tyrosine residue (T490Y). In some embodiments, the threonine residue at position 490 is replaced by a serine residue (T490R). In some embodiments, the threonine residue at position 490 is replaced by an alanine residue (T490K). In some embodiments, the threonine residue at position 490 is replaced by a phenylalanine residue (T490P). In some embodiments, the threonine residue at position 490 is replaced by a tyrosine residue (T490E).

[0692] In some embodiments, the adenosine deaminase comprises a mutation at valine493 of the hADAR2-D amino acid sequence, or a corresponding position in a homologous ADAR protein. In some embodiments, the valine residue at position 493 is replaced by an alanine residue (V493A). In some embodiments, the valine residue at position 493 is replaced by a serine residue (V493S). In some embodiments, the valine residue at position 493 is replaced by a threonine residue (V493T). In some embodiments, the valine residue at position 493 is replaced by an arginine residue (V493R). In some embodiments, the valine residue at position 493 is replaced by an aspartic acid residue (V493D). In some embodiments, the valine residue at position 493 is replaced by a proline residue (V493P). In some embodiments, the valine residue at position 493 is replaced by a glycine residue (V493G).

[0693] In some embodiments, the adenosine deaminase comprises a mutation at alanine 589 of the hADAR2-D amino acid sequence, or a corresponding position in a homologous ADAR protein. In some embodiments, the alanine residue at position 589 is replaced by a valine residue (A589V).

[0694] In some embodiments, the adenosine deaminase comprises a mutation at asparagine 597 of the hADAR2-D amino acid sequence, or a corresponding position in a homologous ADAR protein. In some embodiments, the asparagine residue at position 597 is replaced by a lysine residue (N597K). In some embodiments, the adenosine deaminase comprises a mutation at position 597 of the amino acid sequence, which has an asparagine residue in the wild type sequence. In some embodiments, the asparagine residue at position 597 is replaced by an arginine residue (N597R). In some embodiments, the adenosine deaminase comprises a mutation at position 597 of the amino acid sequence, which has an asparagine residue in the wild type sequence. In some embodiments, the asparagine residue at position 597 is replaced by an alanine residue (N597A). In some embodiments, the adenosine deaminase comprises a mutation at position 597 of the amino acid sequence, which has an asparagine residue in the wild type sequence. In some embodiments, the asparagine residue at position 597 is replaced by a glutamic acid residue (N597E). In some embodiments, the adenosine deaminase comprises a mutation at position 597 of the amino acid sequence, which has an asparagine residue in the wild type sequence. In some embodiments, the asparagine residue at position 597 is replaced by a histidine residue (N597H). In some embodiments, the adenosine deaminase comprises a mutation at position 597 of the amino acid sequence, which has an asparagine residue in the wild type sequence. In some embodiments, the asparagine residue at position 597 is replaced by a glycine residue (N597G). In some embodiments, the adenosine deaminase comprises a mutation at position 597 of the amino acid sequence, which has an asparagine residue in the wild type sequence. In some embodiments, the asparagine residue at position 597 is replaced by a tyrosine residue (N597Y). In some embodiments, the asparagine residue at position 597 is replaced by a phenylalanine residue (N597F).

[0695] In some embodiments, the adenosine deaminase comprises a mutation at serine599 of the hADAR2-D amino acid sequence, or a corresponding position in a homologous ADAR protein. In some embodiments, the serine residue at position 599 is replaced by a threonine residue (S599T).

[0696] In some embodiments, the adenosine deaminase comprises a mutation at asparagine613 of the hADAR2-D amino acid sequence, or a corresponding position in a homologous ADAR protein. In some embodiments, the asparagine residue at position 613 is replaced by a lysine residue (N613K). In some embodiments, the adenosine deaminase comprises a mutation at position 613 of the amino acid sequence, which has an asparagine residue in the wild type sequence. In some embodiments, the asparagine residue at position 613 is replaced by an arginine residue (N613R). In some embodiments, the adenosine deaminase comprises a mutation at position 613 of the amino acid sequence, which has an asparagine residue in the wild type sequence. In some embodiments, the asparagine residue at position 613 is replaced by an alanine residue (N613A) In some embodiments, the adenosine deaminase comprises a mutation at position 613 of the amino acid sequence, which has an asparagine residue in the wild type sequence. In some embodiments, the asparagine residue at position 613 is replaced by a glutamic acid residue (N613E).

[0697] In some embodiments, to improve editing efficiency, the adenosine deaminase may comprise one or more of the mutations: G336D, G487A, G487V, E488Q, E488H, E488R, E488N, E488A, E488S, E488M, T490C, T490S, V493T, V493S, V493A, V493R, V493D, V493P, V493G, N597K, N597R, N597A, N597E, N597H, N597G, N597Y, A589V, S599T, N613K, N613R, N613A, N613E, based on amino acid sequence positions of hADAR2-D, and mutations in a homologous ADAR protein corresponding to the above.

[0698] In some embodiments, to reduce editing efficiency, the adenosine deaminase may comprise one or more of the mutations: E488F, E488L, E488W, T490A, T490F, T490Y, T490R, T490K, T490P, T490E, N597F, based on amino acid sequence positions of hADAR2-D, and mutations in a homologous ADAR protein corresponding to the above. In particular embodiments, it can be of interest to use an adenosine deaminase enzyme with reduced efficacy to reduce off-target effects.

[0699] In certain embodiments, improvement of editing and reduction of off-target modification is achieved by chemical modification of gRNAs. gRNAs which are chemically modified as exemplified in Vogel et al. (2014), Angew Chem Int Ed, 53:6267-6271, doi:10.1002/anie.201402634 (incorporated herein by reference in its entirety) reduce off-target activity and improve on-target efficiency. 2′-O-methyl and phosphothioate modified guide RNAs in general improve editing efficiency in cells.

[0700] ADAR has been known to demonstrate a preference for neighboring nucleotides on either side of the edited A (www.nature.com/nsmb/journal/v23/n5/full/nsmb.3203.html, Matthews et al. (2017), Nature Structural Mol Biol, 23(5): 426-433, incorporated herein by reference in its entirety). Accordingly, in certain embodiments, the gRNA, target, and/or ADAR is selected optimized for motif preference.

[0701] Intentional mismatches have been demonstrated in vitro to allow for editing of non-preferred motifs (https://academic.oup.com/nar/article-lookup/doi/10.1093/nar/gku272; Schneider et al (2014), Nucleic Acid Res, 42(10):e87); Fukuda et al. (2017), Scientific Reports, 7, doi:10.1038/srep41478, incorporated herein by reference in its entirety). Accordingly, in certain embodiments, to enhance RNA editing efficiency on non-preferred 5′ or 3′ neighboring bases, intentional mismatches in neighboring bases are introduced.

[0702] Results suggest that As opposite Cs in the targeting window of the ADAR deaminase domain are preferentially edited over other bases. Additionally, As base-paired with Us within a few bases of the targeted base show low levels of editing by Cas13b-ADAR fusions, suggesting that there is flexibility for the enzyme to edit multiple A's. See e.g. FIG. 18. These two observations suggest that multiple As in the activity window of Cas13b-ADAR fusions could be specified for editing by mismatching all As to be edited with Cs. Accordingly, in certain embodiments, multiple A:C mismatches in the activity window are designed to create multiple A:I edits. In certain embodiments, to suppress potential off-target editing in the activity window, non-target As are paired with As or Gs.

[0703] The terms “editing specificity” and “editing preference” are used interchangeably herein to refer to the extent of A-to-I editing at a particular adenosine site in a double-stranded substrate. In some embodiment, the substrate editing preference is determined by the 5′ nearest neighbor and/or the 3′ nearest neighbor of the target adenosine residue. In some embodiments, the adenosine deaminase has preference for the 5′ nearest neighbor of the substrate ranked as U>A>C>G (“>” indicates greater preference). In some embodiments, the adenosine deaminase has preference for the 3′ nearest neighbor of the substrate ranked as G>C˜A>U (“>” indicates greater preference; “˜” indicates similar preference). In some embodiments, the adenosine deaminase has preference for the 3′ nearest neighbor of the substrate ranked as G>C>U˜A (“>” indicates greater preference; “˜” indicates similar preference). In some embodiments, the adenosine deaminase has preference for the 3′ nearest neighbor of the substrate ranked as G>C>A>U (“>” indicates greater preference). In some embodiments, the adenosine deaminase has preference for the 3′ nearest neighbor of the substrate ranked as C˜G˜A>U (“>” indicates greater preference; “˜” indicates similar preference). In some embodiments, the adenosine deaminase has preference for a triplet sequence containing the target adenosine residue ranked as TAG>AAG>CAC>AAT>GAA>GAC (“>” indicates greater preference), the center A being the target adenosine residue.

[0704] In some embodiments, the substrate editing preference of an adenosine deaminase is affected by the presence or absence of a nucleic acid binding domain in the adenosine deaminase protein. In some embodiments, to modify substrate editing preference, the deaminase domain is connected with a double-strand RNA binding domain (dsRBD) or a double-strand RNA binding motif (dsRBM). In some embodiments, the dsRBD or dsRBM may be derived from an ADAR protein, such as hADAR1 or hADAR2. In some embodiments, a full length ADAR protein that comprises at least one dsRBD and a deaminase domain is used. In some embodiments, the one or more dsRBM or dsRBD is at the N-terminus of the deaminase domain. In other embodiments, the one or more dsRBM or dsRBD is at the C-terminus of the deaminase domain.

[0705] In some embodiments, the substrate editing preference of an adenosine deaminase is affected by amino acid residues near or in the active center of the enzyme. In some embodiments, to modify substrate editing preference, the adenosine deaminase may comprise one or more of the mutations: G336D, G487R, G487K, G487W, G487Y, E488Q, E488N, T490A, V493A, V493T, V493S, N597K, N597R, A589V, S599T, N613K, N613R, based on amino acid sequence positions of hADAR2-D, and mutations in a homologous ADAR protein corresponding to the above.

[0706] Particularly, in some embodiments, to reduce editing specificity, the adenosine deaminase can comprise one or more of mutations E488Q, V493A, N597K, N613K, based on amino acid sequence positions of hADAR2-D, and mutations in a homologous ADAR protein corresponding to the above. In some embodiments, to increase editing specificity, the adenosine deaminase can comprise mutation T490A.

[0707] In some embodiments, to reduce off-target effects, the adenosine deaminase comprises one or more of mutations at R348, V351, T375, K376, E396, C451, R455, N473, R474, K475, R477, R481, 5486, E488, T490, 5495, R510, based on amino acid sequence positions of hADAR2-D, and mutations in a homologous ADAR protein corresponding to the above. In some embodiments, the adenosine deaminase comprises mutation at E488 and one or more additional positions selected from R348, V351, T375, K376, E396, C451, R455, N473, R474, K475, R477, R481, S486, T490, S495, R510. In some embodiments, the adenosine deaminase comprises mutation at T375, and optionally at one or more additional positions. In some embodiments, the adenosine deaminase comprises mutation at N473, and optionally at one or more additional positions. In some embodiments, the adenosine deaminase comprises mutation at V351, and optionally at one or more additional positions. In some embodiments, the adenosine deaminase comprises mutation at E488 and T375, and optionally at one or more additional positions. In some embodiments, the adenosine deaminase comprises mutation at E488 and N473, and optionally at one or more additional positions. In some embodiments, the adenosine deaminase comprises mutation E488 and V351, and optionally at one or more additional positions. In some embodiments, the adenosine deaminase comprises mutation at E488 and one or more of T375, N473, and V351.

[0708] In some embodiments, to reduce off-target effects, the adenosine deaminase comprises one or more of mutations selected from R348E, V351L, T375G, T375S, R455G, R455S, R455E, N473D, R474E, K475Q, R477E, R481E, S486T, E488Q, T490A, T490S, S495T, and R510E, based on amino acid sequence positions of hADAR2-D, and mutations in a homologous ADAR protein corresponding to the above. In some embodiments, the adenosine deaminase comprises mutation E488Q and one or more additional mutations selected from R348E, V351L, T375G, T375S, R455G, R455S, R455E, N473D, R474E, K475Q, R477E, R481E, S486T, T490A, T490S, S495T, and R510E. In some embodiments, the adenosine deaminase comprises mutation T375G or T375S, and optionally one or more additional mutations. In some embodiments, the adenosine deaminase comprises mutation N473D, and optionally one or more additional mutations. In some embodiments, the adenosine deaminase comprises mutation V351L, and optionally one or more additional mutations. In some embodiments, the adenosine deaminase comprises mutation E488Q, and T375G or T375G, and optionally one or more additional mutations. In some embodiments, the adenosine deaminase comprises mutation E488Q and N473D, and optionally one or more additional mutations. In some embodiments, the adenosine deaminase comprises mutation E488Q and V351L, and optionally one or more additional mutations. In some embodiments, the adenosine deaminase comprises mutation E488Q and one or more of T375G/S, N473D and V351L.

[0709] In some embodiments, to increase editing preference for target adenosine (A) with an immediate 5′ G, such as substrates comprising the triplet sequence GAC, the center A being the target adenosine residue, the adenosine deaminase can comprise one or more of mutations G336D, E488Q, E488N, V493T, V493S, V493A, A589V, N597K, N597R, S599T, N613K, N613R, based on amino acid sequence positions of hADAR2-D, and mutations in a homologous ADAR protein corresponding to the above.

[0710] Particularly, in some embodiments, the adenosine deaminase comprises mutation E488Q or a corresponding mutation in a homologous ADAR protein for editing substrates comprising the following triplet sequences: GAC, GAA, GAU, GAG, CAU, AAU, UAC, the center A being the target adenosine residue.

[0711] In some embodiments, the adenosine deaminase comprises the wild-type amino acid sequence of hADAR1-D. In some embodiments, the adenosine deaminase comprises one or more mutations in the hADAR1-D sequence, such that the editing efficiency, and/or substrate editing preference of hADAR1-D is changed according to specific needs.

[0712] In some embodiments, the adenosine deaminase comprises a mutation at Glycine1007 of the hADAR1-D amino acid sequence, or a corresponding position in a homologous ADAR protein. In some embodiments, the glycine residue at position 1007 is replaced by a non-polar amino acid residue with relatively small side chains. For example, in some embodiments, the glycine residue at position 1007 is replaced by an alanine residue (G1007A). In some embodiments, the glycine residue at position 1007 is replaced by a valine residue (G1007V). In some embodiments, the glycine residue at position 1007 is replaced by an amino acid residue with relatively large side chains. In some embodiments, the glycine residue at position 1007 is replaced by an arginine residue (G1007R). In some embodiments, the glycine residue at position 1007 is replaced by a lysine residue (G1007K). In some embodiments, the glycine residue at position 1007 is replaced by a tryptophan residue (G1007W). In some embodiments, the glycine residue at position 1007 is replaced by a tyrosine residue (G1007Y). Additionally, in other embodiments, the glycine residue at position 1007 is replaced by a leucine residue (G1007L). In other embodiments, the glycine residue at position 1007 is replaced by a threonine residue (G1007T). In other embodiments, the glycine residue at position 1007 is replaced by a serine residue (G1007S).

[0713] In some embodiments, the adenosine deaminase comprises a mutation at glutamic acid 1008 of the hADAR1-D amino acid sequence, or a corresponding position in a homologous ADAR protein. In some embodiments, the glutamic acid residue at position 1008 is replaced by a polar amino acid residue having a relatively large side chain. In some embodiments, the glutamic acid residue at position 1008 is replaced by a glutamine residue (E1008Q). In some embodiments, the glutamic acid residue at position 1008 is replaced by a histidine residue (E1008H). In some embodiments, the glutamic acid residue at position 1008 is replaced by an arginine residue (E1008R). In some embodiments, the glutamic acid residue at position 1008 is replaced by a lysine residue (E1008K). In some embodiments, the glutamic acid residue at position 1008 is replaced by a nonpolar or small polar amino acid residue. In some embodiments, the glutamic acid residue at position 1008 is replaced by a phenylalanine residue (E1008F). In some embodiments, the glutamic acid residue at position 1008 is replaced by a tryptophan residue (E1008W). In some embodiments, the glutamic acid residue at position 1008 is replaced by a glycine residue (E1008G). In some embodiments, the glutamic acid residue at position 1008 is replaced by an isoleucine residue (E10081). In some embodiments, the glutamic acid residue at position 1008 is replaced by a valine residue (E1008V). In some embodiments, the glutamic acid residue at position 1008 is replaced by a proline residue (E1008P). In some embodiments, the glutamic acid residue at position 1008 is replaced by a serine residue (E1008S). In other embodiments, the glutamic acid residue at position 1008 is replaced by an asparagine residue (E1008N). In other embodiments, the glutamic acid residue at position 1008 is replaced by an alanine residue (E1008A). In other embodiments, the glutamic acid residue at position 1008 is replaced by a Methionine residue (E1008M). In some embodiments, the glutamic acid residue at position 1008 is replaced by a leucine residue (E1008L).

[0714] In some embodiments, to improve editing efficiency, the adenosine deaminase may comprise one or more of the mutations: E1007S, E1007A, E1007V, E1008Q, E1008R, E1008H, E1008M, E1008N, E1008K, based on amino acid sequence positions of hADAR1-D, and mutations in a homologous ADAR protein corresponding to the above.

[0715] In some embodiments, to reduce editing efficiency, the adenosine deaminase may comprise one or more of the mutations: E1007R, E1007K, E1007Y, E1007L, E1007T, E1008G, E10081, E1008P, E1008V, E1008F, E1008W, E1008S, E1008N, E1008K, based on amino acid sequence positions of hADAR1-D, and mutations in a homologous ADAR protein corresponding to the above.

[0716] In some embodiments, the substrate editing preference, efficiency and/or selectivity of an adenosine deaminase is affected by amino acid residues near or in the active center of the enzyme. In some embodiments, the adenosine deaminase comprises a mutation at the glutamic acid 1008 position in hADAR1-D sequence, or a corresponding position in a homologous ADAR protein. In some embodiments, the mutation is E1008R, or a corresponding mutation in a homologous ADAR protein. In some embodiments, the E1008R mutant has an increased editing efficiency for target adenosine residue that has a mismatched G residue on the opposite strand.

[0717] In some embodiments, the adenosine deaminase protein further comprises or is connected to one or more double-stranded RNA (dsRNA) binding motifs (dsRBMs) or domains (dsRBDs) for recognizing and binding to double-stranded nucleic acid substrates. In some embodiments, the interaction between the adenosine deaminase and the double-stranded substrate is mediated by one or more additional protein factor(s), including a CRISPR/CAS protein factor. In some embodiments, the interaction between the adenosine deaminase and the double-stranded substrate is further mediated by one or more nucleic acid component(s), including a guide RNA.

[0718] In certain example embodiments, directed evolution may be used to design modified ADAR proteins capable of catalyzing additional reactions besides deamination of a adenine to a hypoxanthine. For example

[0719] According to the present invention, the substrate of the adenosine deaminase is an RNA/DNAn RNA duplex formed upon binding of the guide molecule to its DNA target which then forms the CRISPR-Cas complex with the CRISPR-Cas enzyme. The RNA/DNA or DNA/RNAn RNA duplex is also referred to herein as the “RNA/DNA hybrid”, “DNA/RNA hybrid” or “double-stranded substrate”. The particular features of the guide molecule and CRISPR-Cas enzyme are detailed below.

[0720] The term “editing selectivity” as used herein refers to the fraction of all sites on a double-stranded substrate that is edited by an adenosine deaminase. Without being bound by theory, it is contemplated that editing selectivity of an adenosine deaminase is affected by the double-stranded substrate's length and secondary structures, such as the presence of mismatched bases, bulges and/or internal loops.

[0721] In some embodiments, when the substrate is a perfectly base-paired duplex longer than 50 bp, the adenosine deaminase may be able to deaminate multiple adenosine residues within the duplex (e.g., 50% of all adenosine residues). In some embodiments, when the substrate is shorter than 50 bp, the editing selectivity of an adenosine deaminase is affected by the presence of a mismatch at the target adenosine site. Particularly, in some embodiments, adenosine (A) residue having a mismatched cytidine (C) residue on the opposite strand is deaminated with high efficiency. In some embodiments, adenosine (A) residue having a mismatched guanosine (G) residue on the opposite strand is skipped without editing.

[0722] With respect to general information on CRISPR-Cas Systems, components thereof, and delivery of such components, including methods, materials, delivery vehicles, vectors, particles, AAV, and making and using thereof, including as to amounts and formulations, all useful in the practice of the instant invention, reference is made to: U.S. Pat. Nos. 8,999,641, 8,993,233, 8,945,839, 8,932,814, 8,906,616, 8,895,308, 8,889,418, 8,889,356, 8,871,445, 8,865,406, 8,795,965, 8,771,945 and 8,697,359; US Patent Publications US 2014-0310830 (U.S. application Ser. No. 14/105,031), US 2014-0287938 A1 (U.S. application Ser. No. 14/213,991), US 2014-0273234 A1 (U.S. application Ser. No. 14/293,674), US2014-0273232 A1 (U.S. application Ser. No. 14/290,575), US 2014-0273231 (U.S. application Ser. No. 14/259,420), US 2014-0256046 A1 (U.S. application Ser. No. 14/226,274), US 2014-0248702 A1 (U.S. application Ser. No. 14/258,458), US 2014-0242700 A1 (U.S. application Ser. No. 14/222,930), US 2014-0242699 A1 (U.S. application Ser. No. 14/183,512), US 2014-0242664 A1 (U.S. application Ser. No. 14/104,990), US 2014-0234972 A1 (U.S. application Ser. No. 14/183,471), US 2014-0227787 A1 (U.S. application Ser. No. 14/256,912), US 2014-0189896 A1 (U.S. application Ser. No. 14/105,035), US 2014-0186958 (U.S. application Ser. No. 14/105,017), US 2014-0186919 A1 (U.S. application Ser. No. 14/104,977), US 2014-0186843 A1 (U.S. application Ser. No. 14/104,900), US 2014-0179770 A1 (U.S. application Ser. No. 14/104,837) and US 2014-0179006 A1 (U.S. application Ser. No. 14/183,486), US 2014-0170753 (U.S. application Ser. No. 14/183,429); European Patents EP 2 784 162 B1 and EP 2 771 468 B1; European Patent Applications EP 2 771 468 (EP13818570.7), EP 2 764 103 (EP13824232.6), and EP 2 784 162 (EP14170383.5); and PCT Patent Publications PCT Patent Publications WO 2014/093661 (PCT/US2013/074743), WO 2014/093694 (PCT/US2013/074790), WO 2014/093595 (PCT/US2013/074611), WO 2014/093718 (PCT/US2013/074825), WO 2014/093709 (PCT/US2013/074812), WO 2014/093622 (PCT/US2013/074667), WO 2014/093635 (PCT/US2013/074691), WO 2014/093655 (PCT/US2013/074736), WO 2014/093712 (PCT/US2013/074819), WO 2014/093701 (PCT/US2013/074800), WO 2014/018423 (PCT/US2013/051418), WO 2014/204723 (PCT/US2014/041790), WO 2014/204724 (PCT/US2014/041800), WO 2014/204725 (PCT/US2014/041803), WO 2014/204726 (PCT/US2014/041804), WO 2014/204727 (PCT/US2014/041806), WO 2014/204728 (PCT/US2014/041808), WO 2014/204729 (PCT/US2014/041809). Reference is also made to U.S. provisional patent applications 61/758,468; 61/802,174; 61/806,375; 61/814,263; 61/819,803 and 61/828,130, filed on Jan. 30, 2013; Mar. 15, 2013; Mar. 28, 2013; Apr. 20, 2013; May 6, 2013 and May 28, 2013 respectively. Reference is also made to U.S. provisional patent application 61/836,123, filed on Jun. 17, 2013. Reference is additionally made to U.S. provisional patent applications 61/835,931, 61/835,936, 61/836,127, 61/836,101, 61/836,080 and 61/835,973, each filed Jun. 17, 2013. Further reference is made to U.S. provisional patent applications 61/862,468 and 61/862,355 filed on Aug. 5, 2013; 61/871,301 filed on Aug. 28, 2013; 61/960,777 filed on Sep. 25, 2013 and 61/961,980 filed on Oct. 28, 2013. Reference is yet further made to: PCT Patent applications Nos: PCT/US2014/041803, PCT/US2014/041800, PCT/US2014/041809, PCT/US2014/041804 and PCT/US2014/041806, each filed Jun. 10, 2014 6/10/14; PCT/US2014/041808 filed Jun. 11, 2014; and PCT/US2014/62558 filed Oct. 28, 2014, and U.S. Provisional Patent Applications Ser. Nos. 61/915,150, 61/915,301, 61/915,267 and 61/915,260, each filed Dec. 12, 2013; 61/757,972 and 61/768,959, filed on Jan. 29, 2013 and Feb. 25, 2013; 61/835,936, 61/836,127, 61/836,101, 61/836,080, 61/835,973, and 61/835,931, filed Jun. 17, 2013; 62/010,888 and 62/010,879, both filed Jun. 11, 2014; 62/010,329 and 62/010,441, each filed Jun. 10, 2014; 61/939,228 and 61/939,242, each filed Feb. 12, 2014; 61/980,012, filed Apr. 15, 2014; 62/038,358, filed Aug. 17, 2014; 62/054,490, 62/055,484, 62/055,460 and 62/055,487, each filed Sep. 25, 2014; and 62/069,243, filed Oct. 27, 2014. Reference is also made to U.S. provisional patent applications Nos. 62/055,484, 62/055,460, and 62/055,487, filed Sep. 25, 2014; U.S. provisional patent application 61/980,012, filed Apr. 15, 2014; and U.S. provisional patent application 61/939,242 filed Feb. 12, 2014. Reference is made to PCT application designating, inter alia, the United States, application No. PCT/US14/41806, filed Jun. 10, 2014. Reference is made to U.S. provisional patent application 61/930,214 filed on Jan. 22, 2014. Reference is made to U.S. provisional patent applications 61/915,251; 61/915,260 and 61/915,267, each filed on Dec. 12, 2013. Reference is made to US provisional patent application U.S. Ser. No. 61/980,012 filed Apr. 15, 2014. Reference is made to PCT application designating, inter alia, the United States, application No. PCT/US14/41806, filed Jun. 10, 2014. Reference is made to U.S. provisional patent application 61/930,214 filed on Jan. 22, 2014. Reference is made to U.S. provisional patent applications 61/915,251; 61/915,260 and 61/915,267, each filed on Dec. 12, 2013.

[0723] Mention is also made of U.S. application 62/091,455, filed, 12 Dec. 2014, PROTECTED GUIDE RNAS (PGRNAS); U.S. application 62/096,708, 24 Dec. 2014, PROTECTED GUIDE RNAS (PGRNAS); U.S. application 62/091,462, 12 Dec. 2014, DEAD GUIDES FOR CRISPR TRANSCRIPTION FACTORS; U.S. application 62/096,324, 23 Dec. 2014, DEAD GUIDES FOR CRISPR TRANSCRIPTION FACTORS; U.S. application 62/091,456, 12 Dec. 2014, ESCORTED AND FUNCTIONALIZED GUIDES FOR CRISPR-CAS SYSTEMS; U.S. application 62/091,461, 12 Dec. 2014, DELIVERY, USE AND THERAPEUTIC APPLICATIONS OF THE CRISPR-CAS SYSTEMS AND COMPOSITIONS FOR GENOME EDITING AS TO HEMATOPOETIC STEM CELLS (HSCs); U.S. application 62/094,903, 19 Dec. 2014, UNBIASED IDENTIFICATION OF DOUBLE-STRAND BREAKS AND GENOMIC REARRANGEMENT BY GENOME-WISE INSERT CAPTURE SEQUENCING; U.S. application 62/096,761, 24 Dec. 2014, ENGINEERING OF SYSTEMS, METHODS AND OPTIMIZED ENZYME AND GUIDE SCAFFOLDS FOR SEQUENCE MANIPULATION; U.S. application 62/098,059, 30 Dec. 2014, RNA-TARGETING SYSTEM; U.S. application 62/096,656, 24 Dec. 2014, CRISPR HAVING OR ASSOCIATED WITH DESTABILIZATION DOMAINS; U.S. application 62/096,697, 24 Dec. 2014, CRISPR HAVING OR ASSOCIATED WITH AAV; U.S. application 62/098,158, 30 Dec. 2014, ENGINEERED CRISPR COMPLEX INSERTIONAL TARGETING SYSTEMS; U.S. application 62/151,052, 22 Apr. 2015, CELLULAR TARGETING FOR EXTRACELLULAR EXOSOMAL REPORTING; U.S. application 62/054,490, 24 Sep. 2014, DELIVERY, USE AND THERAPEUTIC APPLICATIONS OF THE CRISPR-CAS SYSTEMS AND COMPOSITIONS FOR TARGETING DISORDERS AND DISEASES USING PARTICLE DELIVERY COMPONENTS; U.S. application 62/055,484, 25 Sep. 2014, SYSTEMS, METHODS AND COMPOSITIONS FOR SEQUENCE MANIPULATION WITH OPTIMIZED FUNCTIONAL CRISPR-CAS SYSTEMS; U.S. application 62/087,537, 4 Dec. 2014, SYSTEMS, METHODS AND COMPOSITIONS FOR SEQUENCE MANIPULATION WITH OPTIMIZED FUNCTIONAL CRISPR-CAS SYSTEMS; U.S. application 62/054,651, 24 Sep. 2014, DELIVERY, USE AND THERAPEUTIC APPLICATIONS OF THE CRISPR-CAS SYSTEMS AND COMPOSITIONS FOR MODELING COMPETITION OF MULTIPLE CANCER MUTATIONS IN VIVO; U.S. application 62/067,886, 23 Oct. 2014, DELIVERY, USE AND THERAPEUTIC APPLICATIONS OF THE CRISPR-CAS SYSTEMS AND COMPOSITIONS FOR MODELING COMPETITION OF MULTIPLE CANCER MUTATIONS IN VIVO; U.S. application 62/054,675, 24 Sep. 2014, DELIVERY, USE AND THERAPEUTIC APPLICATIONS OF THE CRISPR-CAS SYSTEMS AND COMPOSITIONS IN NEURONAL CELLS/TISSUES; U.S. application 62/054,528, 24 Sep. 2014, DELIVERY, USE AND THERAPEUTIC APPLICATIONS OF THE CRISPR-CAS SYSTEMS AND COMPOSITIONS IN IMMUNE DISEASES OR DISORDERS; U.S. application 62/055,454, 25 Sep. 2014, DELIVERY, USE AND THERAPEUTIC APPLICATIONS OF THE CRISPR-CAS SYSTEMS AND COMPOSITIONS FOR TARGETING DISORDERS AND DISEASES USING CELL PENETRATION PEPTIDES (CPP); U.S. application 62/055,460, 25 Sep. 2014, MULTIFUNCTIONAL-CRISPR COMPLEXES AND/OR OPTIMIZED ENZYME LINKED FUNCTIONAL-CRISPR COMPLEXES; U.S. application 62/087,475, 4 Dec. 2014, FUNCTIONAL SCREENING WITH OPTIMIZED FUNCTIONAL CRISPR-CAS SYSTEMS; U.S. application 62/055,487, 25 Sep. 2014, FUNCTIONAL SCREENING WITH OPTIMIZED FUNCTIONAL CRISPR-CAS SYSTEMS; U.S. application 62/087,546, 4 Dec. 2014, MULTIFUNCTIONAL CRISPR COMPLEXES AND/OR OPTIMIZED ENZYME LINKED FUNCTIONAL-CRISPR COMPLEXES; and U.S. application 62/098,285, 30 Dec. 2014, CRISPR MEDIATED IN VIVO MODELING AND GENETIC SCREENING OF TUMOR GROWTH AND METASTASIS.

[0724] Each of these patents, patent publications, and applications, and all documents cited therein or during their prosecution (“appin cited documents”) and all documents cited or referenced in the appln cited documents, together with any instructions, descriptions, product specifications, and product sheets for any products mentioned therein or in any document therein and incorporated by reference herein, are hereby incorporated herein by reference, and may be employed in the practice of the invention. All documents (e.g., these patents, patent publications and applications and the appln cited documents) are incorporated herein by reference to the same extent as if each individual document was specifically and individually indicated to be incorporated by reference.

[0725] Also with respect to general information on CRISPR-Cas Systems, mention is made of the following (also hereby incorporated herein by reference):
[0726] Multiplex genome engineering using CRISPR/Cas systems. Cong, L., Ran, F. A., Cox, D., Lin, S., Barretto, R., Habib, N., Hsu, P. D., Wu, X., Jiang, W., Marraffini, L. A., & Zhang, F. Science February 15; 339(6121):819-23 (2013);
[0727] RNA-guided editing of bacterial genomes using CRISPR-Cas systems. Jiang W., Bikard D., Cox D., Zhang F, Marraffini L A. Nat Biotechnol March; 31(3):233-9 (2013);
[0728] One-Step Generation of Mice Carrying Mutations in Multiple Genes by CRISPR/Cas-Mediated Genome Engineering. Wang H., Yang H., Shivalila C S., Dawlaty M M., Cheng A W., Zhang F., Jaenisch R. Cell May 9; 153(4):910-8 (2013);
[0729] Optical control of mammalian endogenous transcription and epigenetic states. Konermann S, Brigham M D, Trevino A E, Hsu P D, Heidenreich M, Cong L, Platt R J, Scott D A, Church G M, Zhang F. Nature. August 22; 500(7463):472-6. doi: 10.1038/Nature12466. Epub 2013 Aug. 23 (2013);
[0730] Double Nicking by RNA-Guided CRISPR Cas9 for Enhanced Genome Editing Specificity. Ran, F A., Hsu, P D., Lin, C Y., Gootenberg, J S., Konermann, S., Trevino, A E., Scott, D A., Inoue, A., Matoba, S., Zhang, Y., & Zhang, F. Cell August 28. pii: S0092-8674(13)01015-5 (2013-A);
[0731] DNA targeting specificity of RNA-guided Cas9 nucleases. Hsu, P., Scott, D., Weinstein, J., Ran, F A., Konermann, S., Agarwala, V., Li, Y., Fine, E., Wu, X., Shalem, O., Cradick, T J., Marraffini, L A., Bao, G., & Zhang, F. Nat Biotechnol doi:10.1038/nbt.2647 (2013);
[0732] Genome engineering using the CRISPR-Cas9 system. Ran, F A., Hsu, P D., Wright, J., Agarwala, V., Scott, D A., Zhang, F. Nature Protocols November; 8(11):2281-308 (2013-B);
[0733] Genome-Scale CRISPR-Cas9 Knockout Screening in Human Cells. Shalem, O., Sanjana, N E., Hartenian, E., Shi, X., Scott, D A., Mikkelson, T., Heckl, D., Ebert, B L., Root, D E., Doench, J G., Zhang, F. Science Dec. 12, 2013). [Epub ahead of print];
[0734] Crystal structure of cas9 in complex with guide RNA and target DNA. Nishimasu, H., Ran, F A., Hsu, P D., Konermann, S., Shehata, S I., Dohmae, N., Ishitani, R., Zhang, F., Nureki, O. Cell February 27, 156(5):935-49 (2014);
[0735] Genome-wide binding of the CRISPR endonuclease Cas9 in mammalian cells. Wu X., Scott D A., Kriz A J., Chiu A C., Hsu P D., Dadon D B., Cheng A W., Trevino A E., Konermann S., Chen S., Jaenisch R., Zhang F., Sharp P A. Nat Biotechnol. April 20. doi: 10.1038/nbt.2889 (2014);
[0736] CRISPR-Cas9 Knockin Mice for Genome Editing and Cancer Modeling. Platt R J, Chen S, Zhou Y, Yim M J, Swiech L, Kempton H R, Dahlman J E, Parnas O, Eisenhaure T M, Jovanovic M, Graham D B, Jhunjhunwala S, Heidenreich M, Xavier R J, Langer R, Anderson D G, Hacohen N, Regev A, Feng G, Sharp P A, Zhang F. Cell 159(2): 440-455 DOI: 10.1016/j.ce11.2014.09.014(2014);
[0737] Development and Applications of CRISPR-Cas9 for Genome Engineering, Hsu P D, Lander E S, Zhang F., Cell. June 5; 157(6):1262-78 (2014).
[0738] Genetic screens in human cells using the CRISPR/Cas9 system, Wang T, Wei J J, Sabatini D M, Lander E S., Science. January 3; 343(6166): 80-84. doi:10.1126/science. 1246981 (2014);
[0739] Rational design of highly active sgRNAs for CRISPR-Cas9-mediated gene inactivation, Doench J G, Hartenian E, Graham D B, Tothova Z, Hegde M, Smith I, Sullender M, Ebert B L, Xavier R J, Root D E., (published online 3 Sep. 2014) Nat Biotechnol. December; 32(12):1262-7 (2014);
[0740] In vivo interrogation of gene function in the mammalian brain using CRISPR-Cas9, Swiech L, Heidenreich M, Banerjee A, Habib N, Li Y, Trombetta J, Sur M, Zhang F., (published online 19 Oct. 2014) Nat Biotechnol. January; 33(1):102-6 (2015);
[0741] Genome-scale transcriptional activation by an engineered CRISPR-Cas9 complex, Konermann S, Brigham M D, Trevino A E, Joung J, Abudayyeh O O, Barcena C, Hsu P D, Habib N, Gootenberg J S, Nishimasu H, Nureki O, Zhang F., Nature. January 29; 517(7536):583-8 (2015).
[0742] A split-Cas9 architecture for inducible genome editing and transcription modulation, Zetsche B, Volz S E, Zhang F., (published online 2 Feb. 2015) Nat Biotechnol. February; 33(2):139-42 (2015);
[0743] Genome-wide CRISPR Screen in a Mouse Model of Tumor Growth and Metastasis, Chen S, Sanjana N E, Zheng K, Shalem O, Lee K, Shi X, Scott D A, Song J, Pan J Q, Weissleder R, Lee H, Zhang F, Sharp P A. Cell 160, 1246-1260, Mar. 12, 2015 (multiplex screen in mouse), and
[0744] In vivo genome editing using Staphylococcus aureus Cas9, Ran F A, Cong L, Yan W X, Scott D A, Gootenberg J S, Kriz A J, Zetsche B, Shalem O, Wu X, Makarova K S, Koonin E V, Sharp P A, Zhang F., (published online 1 Apr. 2015), Nature. April 9; 520(7546):186-91 (2015).
[0745] Shalem et al., “High-throughput functional genomics using CRISPR-Cas9,” Nature Reviews Genetics 16, 299-311 (May 2015).
[0746] Xu et al., “Sequence determinants of improved CRISPR sgRNA design,” Genome Research 25, 1147-1157 (August 2015).
[0747] Parnas et al., “A Genome-wide CRISPR Screen in Primary Immune Cells to Dissect Regulatory Networks,” Cell 162, 675-686 (Jul. 30, 2015).
[0748] Ramanan et al., CRISPR/Cas9 cleavage of viral DNA efficiently suppresses hepatitis B virus,” Scientific Reports 5:10833. doi: 10.1038/srep10833 (Jun. 2, 2015)
[0749] Nishimasu et al., “Crystal Structure of Staphylococcus aureus Cas9,” Cell 162, 1113-1126 (Aug. 27, 2015)
[0750] Zetsche et al. (2015), “Cpf1 is a single RNA-guided endonuclease of a class 2 CRISPR-Cas system,” Cell 163, 759-771 (Oct. 22, 2015) doi: 10.1016/j.ce11.2015.09.038. Epub Sep. 25, 2015
[0751] Shmakov et al. (2015), “Discovery and Functional Characterization of Diverse Class 2 CRISPR-Cas Systems,” Molecular Cell 60, 385-397 (Nov. 5, 2015) doi: 10.1016/j.molce1.2015.10.008. Epub Oct. 22, 2015
[0752] Dahlman et al., “Orthogonal gene control with a catalytically active Cas9 nuclease,” Nature Biotechnology 33, 1159-1161 (November, 2015)
[0753] Gao et al, “Engineered Cpf1 Enzymes with Altered PAM Specificities,” bioRxiv 091611; doi: http://dx.doi.org/10.1101/091611 Epub Dec. 4, 2016
[0754] Smargon et al. (2017), “Cas13b Is a Type VI-B CRISPR-Associated RNA-Guided RNase Differentially Regulated by Accessory Proteins Csx27 and Csx28,”Molecular Cell 65, 618-630 (Feb. 16, 2017) doi: 10.1016/j.molce1.2016.12.023. Epub Jan. 5, 2017
   each of which is incorporated herein by reference, may be considered in the practice of the instant invention, and discussed briefly below:
[0755] Cong et al. engineered type II CRISPR-Cas systems for use in eukaryotic cells based on both Streptococcus thermophilus Cas9 and also Streptococcus pyogenes Cas9 and demonstrated that Cas9 nucleases can be directed by short RNAs to induce precise cleavage of DNA in human and mouse cells. Their study further showed that Cas9 as converted into a nicking enzyme can be used to facilitate homology-directed repair in eukaryotic cells with minimal mutagenic activity. Additionally, their study demonstrated that multiple guide sequences can be encoded into a single CRISPR array to enable simultaneous editing of several at endogenous genomic loci sites within the mammalian genome, demonstrating easy programmability and wide applicability of the RNA-guided nuclease technology. This ability to use RNA to program sequence specific DNA cleavage in cells defined a new class of genome engineering tools. These studies further showed that other CRISPR loci are likely to be transplantable into mammalian cells and can also mediate mammalian genome cleavage. Importantly, it can be envisaged that several aspects of the CRISPR-Cas system can be further improved to increase its efficiency and versatility.
[0756] Jiang et al. used the clustered, regularly interspaced, short palindromic repeats (CRISPR)-associated Cas9 endonuclease complexed with dual-RNAs to introduce precise mutations in the genomes of Streptococcus pneumoniae and Escherichia coli. The approach relied on dual-RNA:Cas9-directed cleavage at the targeted genomic site to kill unmutated cells and circumvents the need for selectable markers or counter-selection systems. The study reported reprogramming dual-RNA:Cas9 specificity by changing the sequence of short CRISPR RNA (crRNA) to make single- and multinucleotide changes carried on editing templates. The study showed that simultaneous use of two crRNAs enabled multiplex mutagenesis. Furthermore, when the approach was used in combination with recombineering, in S. pneumoniae, nearly 100% of cells that were recovered using the described approach contained the desired mutation, and in E. coli, 65% that were recovered contained the mutation.
[0757] Wang et al. (2013) used the CRISPR/Cas system for the one-step generation of mice carrying mutations in multiple genes which were traditionally generated in multiple steps by sequential recombination in embryonic stem cells and/or time-consuming intercrossing of mice with a single mutation. The CRISPR/Cas system will greatly accelerate the in vivo study of functionally redundant genes and of epistatic gene interactions.
[0758] Konermann et al. (2013) addressed the need in the art for versatile and robust technologies that enable optical and chemical modulation of DNA-binding domains based CRISPR Cas9 enzyme and also Transcriptional Activator Like Effectors
[0759] Ran et al. (2013-A) described an approach that combined a Cas9 nickase mutant with paired guide RNAs to introduce targeted double-strand breaks. This addresses the issue of the Cas9 nuclease from the microbial CRISPR-Cas system being targeted to specific genomic loci by a guide sequence, which can tolerate certain mismatches to the DNA target and thereby promote undesired off-target mutagenesis. Because individual nicks in the genome are repaired with high fidelity, simultaneous nicking via appropriately offset guide RNAs is required for double-stranded breaks and extends the number of specifically recognized bases for target cleavage. The authors demonstrated that using paired nicking can reduce off-target activity by 50- to 1,500-fold in cell lines and to facilitate gene knockout in mouse zygotes without sacrificing on-target cleavage efficiency. This versatile strategy enables a wide variety of genome editing applications that require high specificity.
[0760] Hsu et al. (2013) characterized SpCas9 targeting specificity in human cells to inform the selection of target sites and avoid off-target effects. The study evaluated >700 guide RNA variants and SpCas9-induced indel mutation levels at >100 predicted genomic off-target loci in 293T and 293FT cells. The authors that SpCas9 tolerates mismatches between guide RNA and target DNA at different positions in a sequence-dependent manner, sensitive to the number, position and distribution of mismatches. The authors further showed that SpCas9-mediated cleavage is unaffected by DNA methylation and that the dosage of SpCas9 and sgRNA can be titrated to minimize off-target modification. Additionally, to facilitate mammalian genome engineering applications, the authors reported providing a web-based software tool to guide the selection and validation of target sequences as well as off-target analyses.
[0761] Ran et al. (2013-B) described a set of tools for Cas9-mediated genome editing via non-homologous end joining (NHEJ) or homology-directed repair (HDR) in mammalian cells, as well as generation of modified cell lines for downstream functional studies. To minimize off-target cleavage, the authors further described a double-nicking strategy using the Cas9 nickase mutant with paired guide RNAs. The protocol provided by the authors experimentally derived guidelines for the selection of target sites, evaluation of cleavage efficiency and analysis of off-target activity. The studies showed that beginning with target design, gene modifications can be achieved within as little as 1-2 weeks, and modified clonal cell lines can be derived within 2-3 weeks.
[0762] Shalem et al. described a new way to interrogate gene function on a genome-wide scale. Their studies showed that delivery of a genome-scale CRISPR-Cas9 knockout (GeCKO) library targeted 18,080 genes with 64,751 unique guide sequences enabled both negative and positive selection screening in human cells. First, the authors showed use of the GeCKO library to identify genes essential for cell viability in cancer and pluripotent stem cells. Next, in a melanoma model, the authors screened for genes whose loss is involved in resistance to vemurafenib, a therapeutic that inhibits mutant protein kinase BRAF. Their studies showed that the highest-ranking candidates included previously validated genes NF1 and MED12 as well as novel hits NF2, CUL3, TADA2B, and TADA1. The authors observed a high level of consistency between independent guide RNAs targeting the same gene and a high rate of hit confirmation, and thus demonstrated the promise of genome-scale screening with Cas9.
[0763] Nishimasu et al. reported the crystal structure of Streptococcus pyogenes Cas9 in complex with sgRNA and its target DNA at 2.5 A° resolution. The structure revealed a bilobed architecture composed of target recognition and nuclease lobes, accommodating the sgRNA:DNA heteroduplex in a positively charged groove at their interface. Whereas the recognition lobe is essential for binding sgRNA and DNA, the nuclease lobe contains the HNH and RuvC nuclease domains, which are properly positioned for cleavage of the complementary and non-complementary strands of the target DNA, respectively. The nuclease lobe also contains a carboxyl-terminal domain responsible for the interaction with the protospacer adjacent motif (PAM). This high-resolution structure and accompanying functional analyses have revealed the molecular mechanism of RNA-guided DNA targeting by Cas9, thus paving the way for the rational design of new, versatile genome-editing technologies.
[0764] Wu et al. mapped genome-wide binding sites of a catalytically inactive Cas9 (dCas9) from Streptococcus pyogenes loaded with single guide RNAs (sgRNAs) in mouse embryonic stem cells (mESCs). The authors showed that each of the four sgRNAs tested targets dCas9 to between tens and thousands of genomic sites, frequently characterized by a 5-nucleotide seed region in the sgRNA and an NGG protospacer adjacent motif (PAM). Chromatin inaccessibility decreases dCas9 binding to other sites with matching seed sequences; thus 70% of off-target sites are associated with genes. The authors showed that targeted sequencing of 295 dCas9 binding sites in mESCs transfected with catalytically active Cas9 identified only one site mutated above background levels. The authors proposed a two-state model for Cas9 binding and cleavage, in which a seed match triggers binding but extensive pairing with target DNA is required for cleavage.
[0765] Platt et al. established a Cre-dependent Cas9 knockin mouse. The authors demonstrated in vivo as well as ex vivo genome editing using adeno-associated virus (AAV)-, lentivirus-, or particle-mediated delivery of guide RNA in neurons, immune cells, and endothelial cells.
[0766] Hsu et al. (2014) is a review article that discusses generally CRISPR-Cas9 history from yogurt to genome editing, including genetic screening of cells.
[0767] Wang et al. (2014) relates to a pooled, loss-of-function genetic screening approach suitable for both positive and negative selection that uses a genome-scale lentiviral single guide RNA (sgRNA) library.
[0768] Doench et al. created a pool of sgRNAs, tiling across all possible target sites of a panel of six endogenous mouse and three endogenous human genes and quantitatively assessed their ability to produce null alleles of their target gene by antibody staining and flow cytometry. The authors showed that optimization of the PAM improved activity and also provided an on-line tool for designing sgRNAs.
[0769] Swiech et al. demonstrate that AAV-mediated SpCas9 genome editing can enable reverse genetic studies of gene function in the brain.
[0770] Konermann et al. (2015) discusses the ability to attach multiple effector domains, e.g., transcriptional activator, functional and epigenomic regulators at appropriate positions on the guide such as stem or tetraloop with and without linkers.
[0771] Zetsche et al. demonstrates that the Cas9 enzyme can be split into two and hence the assembly of Cas9 for activation can be controlled.
[0772] Chen et al. relates to multiplex screening by demonstrating that a genome-wide in vivo CRISPR-Cas9 screen in mice reveals genes regulating lung metastasis.
[0773] Ran et al. (2015) relates to SaCas9 and its ability to edit genomes and demonstrates that one cannot extrapolate from biochemical assays. Shalem et al. (2015) described ways in which catalytically inactive Cas9 (dCas9) fusions are used to synthetically repress (CRISPRi) or activate (CRISPRa) expression, showing. advances using Cas9 for genome-scale screens, including arrayed and pooled screens, knockout approaches that inactivate genomic loci and strategies that modulate transcriptional activity.
[0774] Shalem et al. (2015) described ways in which catalytically inactive Cas9 (dCas9) fusions are used to synthetically repress (CRISPRi) or activate (CRISPRa) expression, showing. advances using Cas9 for genome-scale screens, including arrayed and pooled screens, knockout approaches that inactivate genomic loci and strategies that modulate transcriptional activity.
[0775] Xu et al. (2015) assessed the DNA sequence features that contribute to single guide RNA (sgRNA) efficiency in CRISPR-based screens. The authors explored efficiency of CRISPR/Cas9 knockout and nucleotide preference at the cleavage site. The authors also found that the sequence preference for CRISPRi/a is substantially different from that for CRISPR/Cas9 knockout.
[0776] Parnas et al. (2015) introduced genome-wide pooled CRISPR-Cas9 libraries into dendritic cells (DCs) to identify genes that control the induction of tumor necrosis factor (Tnf) by bacterial lipopolysaccharide (LPS). Known regulators of Tlr4 signaling and previously unknown candidates were identified and classified into three functional modules with distinct effects on the canonical responses to LPS.
[0777] Ramanan et al (2015) demonstrated cleavage of viral episomal DNA (cccDNA) in infected cells. The HBV genome exists in the nuclei of infected hepatocytes as a 3.2 kb double-stranded episomal DNA species called covalently closed circular DNA (cccDNA), which is a key component in the HBV life cycle whose replication is not inhibited by current therapies. The authors showed that sgRNAs specifically targeting highly conserved regions of HBV robustly suppresses viral replication and depleted cccDNA.
[0778] Nishimasu et al. (2015) reported the crystal structures of SaCas9 in complex with a single guide RNA (sgRNA) and its double-stranded DNA targets, containing the 5′-TTGAAT-3′ PAM and the 5′-TTGGGT-3′ PAM. A structural comparison of SaCas9 with SpCas9 highlighted both structural conservation and divergence, explaining their distinct PAM specificities and orthologous sgRNA recognition.
[0779] Zetsche et al. (2015) reported the characterization of Cpf1, a putative class 2 CRISPR effector. It was demonstrated that Cpf1 mediates robust DNA interference with features distinct from Cas9. Identifying this mechanism of interference broadens our understanding of CRISPR-Cas systems and advances their genome editing applications.
[0780] Shmakov et al. (2015) reported the characterization of three distinct Class 2 CRISPR-Cas systems. The effectors of two of the identified systems, C2c1 and C2c3, contain RuvC like endonuclease domains distantly related to Cpf1. The third system, Cas13b, contains an effector with two predicted HEPN RNase domains.
[0781] Gao et al. (2016) reported using a structure-guided saturation mutagenesis screen to increase the targeting range of Cpf1. AsCpf1 variants were engineered with the mutations S542R/K607R and S542R/K548V/N552R that can cleave target sites with TYCV/CCCC and TATV PAMs, respectively, with enhanced activities in vitro and in human cells.

[0782] Also, “Dimeric CRISPR RNA-guided Fok1 nucleases for highly specific genome editing”, Shengdar Q. Tsai, Nicolas Wyvekens, Cyd Khayter, Jennifer A. Foden, Vishal Thapar, Deepak Reyon, Mathew J. Goodwin, Martin J. Aryee, J. Keith Joung Nature Biotechnology 32(6): 569-77 (2014), relates to dimeric RNA-guided Fok1 Nucleases that recognize extended sequences and can edit endogenous genes with high efficiencies in human cells.

[0783] In addition, mention is made of PCT application PCT/US14/70057, Attorney Reference 47627.99.2060 and BI-2013/107 entitled “DELIVERY, USE AND THERAPEUTIC APPLICATIONS OF THE CRISPR-CAS SYSTEMS AND COMPOSITIONS FOR TARGETING DISORDERS AND DISEASES USING PARTICLE DELIVERY COMPONENTS (claiming priority from one or more or all of US provisional patent applications: 62/054,490, filed Sep. 24, 2014; 62/010,441, filed Jun. 10, 2014; and 61/915,118, 61/915,215 and 61/915,148, each filed on Dec. 12, 2013) (“the Particle Delivery PCT”), incorporated herein by reference, with respect to a method of preparing an sgRNA-and-Cas9 protein containing particle comprising admixing a mixture comprising an sgRNA and Cas9 protein (and optionally HDR template) with a mixture comprising or consisting essentially of or consisting of surfactant, phospholipid, biodegradable polymer, lipoprotein and alcohol; and particles from such a process. For example, wherein Cas9 protein and sgRNA were mixed together at a suitable, e.g., 3:1 to 1:3 or 2:1 to 1:2 or 1:1 molar ratio, at a suitable temperature, e.g., 15-30C, e.g., 20-25C, e.g., room temperature, for a suitable time, e.g., 15-45, such as 30 minutes, advantageously in sterile, nuclease free buffer, e.g., 1×PBS. Separately, particle components such as or comprising: a surfactant, e.g., cationic lipid, e.g., 1,2-dioleoyl-3-trimethylammonium-propane (DOTAP); phospholipid, e.g., dimyristoylphosphatidylcholine (DMPC); biodegradable polymer, such as an ethylene-glycol polymer or PEG, and a lipoprotein, such as a low-density lipoprotein, e.g., cholesterol were dissolved in an alcohol, advantageously a C1-6 alkyl alcohol, such as methanol, ethanol, isopropanol, e.g., 100% ethanol. The two solutions were mixed together to form particles containing the Cas9-sgRNA complexes. Accordingly, sgRNA may be pre-complexed with the Cas9 protein, before formulating the entire complex in a particle. Formulations may be made with a different molar ratio of different components known to promote delivery of nucleic acids into cells (e.g. 1,2-dioleoyl-3-trimethylammonium-propane (DOTAP), 1,2-ditetradecanoyl-sn-glycero-3-phosphocholine (DMPC), polyethylene glycol (PEG), and cholesterol) For example DOTAP:DMPC:PEG:Cholesterol Molar Ratios may be DOTAP 100, DMPC 0, PEG 0, Cholesterol 0; or DOTAP 90, DMPC 0, PEG 10, Cholesterol 0; or DOTAP 90, DMPC 0, PEG 5, Cholesterol 5. DOTAP 100, DMPC 0, PEG 0, Cholesterol 0. That application accordingly comprehends admixing sgRNA, Cas9 protein and components that form a particle; as well as particles from such admixing. Aspects of the instant invention can involve particles; for example, particles using a process analogous to that of the Particle Delivery PCT, e.g., by admixing a mixture comprising sgRNA and/or Cas9 as in the instant invention and components that form a particle, e.g., as in the Particle Delivery PCT, to form a particle and particles from such admixing (or, of course, other particles involving sgRNA and/or Cas9 as in the instant invention).

### EXAMPLES

### Example 1: Cas13b Orthologs

[0784] Cas13b proteins shown in Table 1 below are advantageously produced from constructs which are codon optimized for expression in mammalian cells. The sequences below are also given in FIG. 1, along with the accession number of the protein sequence. PFS motifs of the Cas13b orthologs are provided in Table 2.

TABLE 1

| | | |
|---|---|---|
| Bergeyella | 1 | MENKTSLGNNIYYNPFKPQDKSYFAGYFNAAMENTDSVFRELG |
| zoohelcum | | KRLKGKEYTSENFFDAIFKENISLVEYERYVKLLSDYFPMARL |
| | | LDKKEVPIKERKENFKKNFKGIIKAVRDLRNFYTHKEHGEVEI |
| | | TDEIFGVLDEMLKSTVLTVKKKKVKTDKTKEILKKSIEKQLDI |
| | | LCQKKLEYLRDTARKIEEKRRNQRERGEKELVAPFKYSDKRDD |
| | | LIAAIYNDAFDVYIDKKKDSLKESSKAKYNTKSDPQQEEGDLK |
| | | IPISKNGVVFLLSLFLTKQEIHAFKSKIAGFKATVIDEATVSE |
| | | ATVSHGKNSICFMATHEIFSHLAYKKLKRKVRTAEINYGEAEN |
| | | AEQLSVYAKETLMMQMLDELSKVPDVVYQNLSEDVQKTFIEDW |
| | | NEYLKENNGDVGTMEEEQVIHPVIRKRYEDKFNYFAIRFLDEF |
| | | AQFPTLRFQVEILGNYLHDSRPKENLISDRRIKEKITVFGRLS |
| | | ELEHKKALFIKNTETNEDREHYWEIFPNPNYDFPKENISVNDK |
| | | DFPIAGSILDREKQPVAGKIGIKVKLLNQQYVSEVDKAVKAHQ |
| | | LKQRKASKPSIQNIIEEIVPINESNPKEAIVFGGQPTAYLSMN |
| | | DIHSILYEFFDKWEKKKEKLEKKGEKELRKEIGKELEKKIVGK |
| | | IQAQIQQIIDKDTNAKILKPYQDGNSTAIDKEKLIKDLKQEQN |
| | | ILQKLKDEQTVREKEYNDFIAYQDKNREINKVRDRNHKQYLKD |
| | | YNLKRKYPEAPARKEVLYREKGKVAVWLANDIKRFMPTDFKNE |
| | | WKGEQHSLLQKSLAYYEQCKEELKNLLPEKVFQHLPFKLGGYF |
| | | QQKYLYQFYTCYLDKRLEYISGLVQQAENFKSENKVFKKVENE |
| | | CFKFLKKQNYTHKELDARVQSILGYPIFLERGFMDEKPTIIKG |
| | | KTFKGNEALFADWFRYYKEYQNFQTFYDTENYPLVELEKKQAD |
| | | RKRKTKIYQQKKNDVFTLLMAKHIFKSVFKQDSIDQFSLEDLY |
| | | QSREERLGNQERARQTGERNTNYIWNKTVDLKLCDGKITVENV |
| | | KLKNVGDFIKYEYDQRVQAFLKYEENIEWQAFLIKESKEEENY |
| | | PYVVEREIEQYEKVRREELLKEVHLIEEYILEKVKDKEILKKG |
| | | DNQNFKYYILNGLLKQLKNEDVESYKVFNLNTEPEDVNINQLK |
| | | QEATDLEQKAFVLTYIRNKFAHNQLPKKEFWDYCQEKYGKIEK |
| | | EKTYAEYFAEVFKKEKEALIK |
| Prevotella | 2 | MEDDKKTTDSIRYELKDKHFWAAFLNLARHNVYITVNHINKIL |
| intermedia | | EEGEINRDGYETTLKNTWNEIKDINKKDRLSKLIIKHFPFLEA |
| | | ATYRLNPTDTTKQKEEKQAEAQSLESLRKSFFVFIYKLRDLRN |
| | | HYSHYKHSKSLERPKFEEGLLEKMYNIFNASIRLVKEDYQYNK |
| | | DINPDEDFKHLDRTEEEFNYYFTKDNEGNITESGLLFFVSLFL |
| | | EKKDAIWMQQKLRGFKDNRENKKKMTNEVFCRSRMLLPKLRLQ |
| | | STQTQDWILLDMLNELIRCPKSLYERLREEDREKFRVPIEIAD |
| | | EDYDAEQEPFKNTLVRHQDRFPYFALRYFDYNEIFTNLRFQID |
| | | LGTYHFSTYKKQIGDYKESHHLTHKLYGFERIQEFTKQNRPDE |
| | | WRKFVKTFNSFETSKEPYIPETTPHYHLENQKIGIRFRNDNDK |
| | | IWPSLKTNSEKNEKSKYKLDKSFQAEAFLSVHELLPMMFYYLL |
| | | LKTENTDNDNEIETKKKENKNDKQEKHKIEEIIENKITEIYAL |
| | | YDTFANGEIKSIDELEEYCKGKDIEIGHLPKQMIAILKDEHKV |
| | | MATEAERKQEEMLVDVQKSLESLDNQINEEIENVERKNSSLKS |
| | | GKIASWLVNDMMRFQPVQKDNEGKPLNNSKANSTEYQLLQRTL |
| | | AFFGSEHERLAPYFKQTKLIESSNPHPFLKDTEWEKCNNILSF |
| | | YRSYLEAKKNFLESLKPEDWEKNQYFLKLKEPKTKPKTLVQGW |
| | | KNGFNLPRGIFTEPIRKWFMKHRENITVAELKRVGLVAKVIPL |
| | | FFSEEYKDSVQPFYNYHFNVGNINKPDEKNFLNCEERRELLRK |
| | | KKDEFKKMTDKEKEENPSYLEFKSWNKFERELRLVRNQDIVTW |
| | | LLCMELFNKKKIKELNVEKIYLKNINTNTTKKEKNTEEKNGEE |
| | | KNIKEKNNILNRIMPMRLPIKVYGRENFSKNKKKKIRRNTFFT |
| | | VYIEEKGTKLLKQGNFKALERDRRLGGLFSFVKTPSKAESKSN |
| | | TISKLRVEYELGEYQKARIEIIKDMLALEKTLIDKYNSLDTDN |
| | | FNKMLTDWLELKGEPDKASFQNDVDLLIAVRNAFSHNQYPMRN |
| | | RIAFANINPFSLSSANTSEEKGLGIANQLKDKTHKTIEKIIEI |
| | | EKPIETKE |
| Prevotella | 3 | MQKQDKLFVDRKKNAIFAFPKYITIMENKEKPEPIYYELTDKH |
| buccae | | FWAAFLNLARHNVYTTINHINRRLEIAELKDDGYMMGIKGSWN |
| | | EQAKKLDKKVRLRDLIMKHFPFLEAAAYEMTNSKSPNNKEQRE |
| | | KEQSEALSLNNLKNVLFIFLEKLQVLRNYYSHYKYSEESPKPI |
| | | FETSLLKNMYKVFDANVRLVKRDYMHHENIDMQRDFTHLNRKK |
| | | QVGRTKNIIDSPNFHYHFADKEGNMTIAGLLFFVSLFLDKKDA |
| | | IWMQKKLKGFKDGRNLREQMTNEVFCRSRISLPKLKLENVQTK |
| | | DWMQLDMLNELVRCPKSLYERLREKDRESFKVPFDIFSDDYNA |
| | | EEEPFKNTLVRHQDRFPYFVLRYFDLNEIFEQLRFQIDLGTYH |
| | | FSIYNKRIGDEDEVRHLTHHLYGFARIQDFAPQNQPEEWRKLV |
| | | KDLDHFETSQEPYISKTAPHYHLENEKIGIKFCSAHNNLFPSL |
| | | QTDKTCNGRSKFNLGTQFTAEAFLSVHELLPMMFYYLLLTKDY |
| | | SRKESADKVEGIIRKEISNIYAIYDAFANNEINSIADLTRRLQ |
| | | NTNILQGHLPKQMISILKGRQKDMGKEAERKIGEMIDDTQRRL |
| | | DLLCKQTNQKIRIGKRNAGLLKSGKIADWLVNDMMRFQPVQKD |
| | | QNNIPINNSKANSTEYRMLQRALALFGSENFRLKAYFNQMNLV |
| | | GNDNPHPFLAETQWEHQTNILSFYRNYLEARKKYLKGLKPQNW |
| | | KQYQHFLILKVQKTNRNTLVTGWKNSFNLPRGIFTQPIREWFE |
| | | KHNNSKRIYDQILSFDRVGFVAKAIPLYFAEEYKDNVQPFYDY |
| | | PFNIGNRLKPKKRQFLDKKERVELWQKNKELFKNYPSEKKKTD |
| | | LAYLDFLSWKKFERELRLIKNQDIVTWLMFKELFNMATVEGLK |
| | | IGEIHLRDIDTNTANEESNNILNRIMPMKLPVKTYETDNKGNI |
| | | LKERPLATFYIEETETKVLKQGNFKALVKDRRLNGLFSFAETT |
| | | DLNLEEHPISKLSVDLELIKYQTTRISIFEMTLGLEKKLIDKY |
| | | STLPTDSFRNMLERWLQCKANRPELKNYVNSLIAVRNAFSHNQ |
| | | YPMYDATLFAEVKKFTLFPSVDTKKIELNIAPQLLEIVGKAIK |
| | | EIEKSENKN |
| Porphyromonas | 4 | MNTVPASENKGQSRTVEDDPQYFGLYLNLARENLIEVESHVRI |
| gingivalis | | KFGKKKLNEESLKQSLLCDHLLSVDRWTKVYGHSRRYLPFLHY |
| | | FDPDSQIEKDHDSKTGVDPDSAQRLIRELYSLLDFLRNDFSHN |
| | | RLDGTTFEHLEVSPDISSFITGTYSLACGRAQSRFAVFFKPDD |
| | | FVLAKNRKEQLISVADGKECLTVSGFAFFICLFLDREQASGML |
| | | SRIRGFKRTDENWARAVHETFCDLCIRHPHDRLESSNTKEALL |
| | | LDMLNELNRCPRILYDMLPEEERAQFLPALDENSMNNLSENSL |
| | | DEESRLLWDGSSDWAEALTKRIRHQDRFPYLMLRFIEEMDLLK |
| | | GIRFRVDLGEIELDSYSKKVGRNGEYDRTITDHALAFGKLSDF |
| | | QNEEEVSRMISGEASYPVRFSLFAPRYAIYDNKIGYCHTSDPV |
| | | YPKSKTGEKRALSNPQSMGFISVHDLRKLLLMELLCEGSFSRM |
| | | QSDFLRKANRILDETAEGKLQFSALFPEMRHRFIPPQNPKSKD |
| | | RREKAETTLEKYKQEIKGRKDKLNSQLLSAFDMDQRQLPSRLL |
| | | DEWMNIRPASHSVKLRTYVKQLNEDCRLRLRKFRKDGDGKARA |
| | | IPLVGEMATFLSQDIVRMIISEETKKLITSAYYNEMQRSLAQY |
| | | AGEENRRQFRAIVAELRLLDPSSGHPFLSATMETAHRYTEGFY |
| | | KCYLEKKREWLAKIFYRPEQDENTKRRISVFFVPDGEARKLLP |
| | | LLIRRRMKEQNDLQDWIRNKQAHPIDLPSHLFDSKVMELLKVK |
| | | DGKKKWNEAFKDWWSTKYPDGMQPFYGLRRELNIHGKSVSYIP |
| | | SDGKKFADCYTHLMEKTVRDKKRELRTAGKPVPPDLAADIKRS |
| | | FHRAVNEREFMLRLVQEDDRLMLMAINKMMTDREEDILPGLKN |
| | | IDSILDEENQFSLAVHAKVLEKEGEGGDNSLSLVPATIEIKSK |
| | | RKDWSKYIRYRYDRRVPGLMSHFPEHKATLDEVKTLLGEYDRC |
| | | RIKIFDWAFALEGAIMSDRDLKPYLHESSSREGKSGEHSTLVK |
| | | MLVEKKGCLTPDESQYLILIRNKAAHNQFPCAAEMPLIYRDVS |
| | | AKVGSIEGSSAKDLPEGSSLVDSLWKKYEMIIRKILPILDPEN |
| | | RFFGKLLNNMSQPINDL |
| Bacteroides | 5 | MESIKNSQKSTGKTLQKDPPYFGLYLNMALLNVRKVENHIRKW |
| pyogenes | | LGDVALLPEKSGFHSLLTTDNLSSAKWTRFYYKSRKFLPFLEM |
| | | FDSDKKSYENRRETAECLDTIDRQKISSLLKEVYGKLQDIRNA |
| | | FSHYHIDDQSVKHTALIISSEMHRFIENAYSFALQKTRARFTG |
| | | VFVETDFLQAEEKGDNKKFFAIGGNEGIKLKDNALIFLICLFL |
| | | DREEAFKFLSRATGFKSTKEKGFLAVRETFCALCCRQPHERLL |
| | | SVNPREALLMDMLNELNRCPDILFEMLDEKDQKSFLPLLGEEE |
| | | QAHILENSLNDELCEAIDDPFEMIASLSKRVRYKNRFPYLMLR |
| | | YIEEKNLLPFIRFRIDLGCLELASYPKKMGEENNYERSVTDHA |
| | | MAFGRLTDFHNEDAVLQQITKGITDEVRFSLYAPRYAIYNNKI |
| | | GFVRTSGSDKISFPTLKKKGGEGHCVAYTLQNTKSFGFISIYD |
| | | LRKILLLSFLDKDKAKNIVSGLLEQCEKHWKDLSENLFDAIRT |
| | | ELQKEFPVPLIRYTLPRSKGGKLVSSKLADKQEKYESEFERRK |
| | | EKLTEILSEKDFDLSQIPRRMIDEWLNVLPTSREKKLKGYVET |
| | | LKLDCRERLRVFEKREKGEHPLPPRIGEMATDLAKDIIRMVID |
| | | QGVKQRITSAYYSEIQRCLAQYAGDDNRRHLDSIIRELRLKDT |
| | | KNGHPFLGKVLRPGLGHTEKLYQRYFEEKKEWLEATFYPAASP |
| | | KRVPRFVNPPTGKQKELPLIIRNLMKERPEWRDWKQRKNSHPI |
| | | DLPSQLFENEICRLLKDKIGKEPSGKLKWNEMFKLYWDKEFPN |
| | | GMQRFYRCKRRVEVFDKVVEYEYSEEGGNYKKYYEALIDEVVR |
| | | QKISSSKEKSKLQVEDLTLSVRRVFKRAINEKEYQLRLLCEDD |
| | | RLLFMAVRDLYDWKEAQLDLDKIDNMLGEPVSVSQVIQLEGGQ |
| | | PDAVIKAECKLKDVSKLMRYCYDGRVKGLMPYFANHEATQEQV |
| | | EMELRHYEDHRRRVFNWVFALEKSVLKNEKLRRFYEESQGGCE |
| | | HRRCIDALRKASLVSEEEYEFLVHIRNKSAHNQFPDLEIGKLP |
| | | PNVTSGFCECIWSKYKAIICRIIPFIDPERRFFGKLLEQK |
| Alistipes sp. | 6 | MSNEIGAFREHQFAYAPGNEKQEEATFATYFNLALSNVEGMMF |
| ZOR0009 | | GEVESNPDKIEKSLDTLPPAILRQIASFIWLSKEDHPDKAYST |
| | | EEVKVIVTDLVRRLCFYRNYFSHCFYLDTQYFYSDELVDTTAI |
| | | GEKLPYNFHHFITNRLFRYSLPEITLFRWNEGERKYEILRDGL |
| | | IFFCCLFLKRGQAERFLNELRFFKRTDEEGRIKRTIFTKYCTR |
| | | ESHKHIGIEEQDFLIFQDIIGDLNRVPKVCDGVVDLSKENERY |
| | | IKNRETSNESDENKARYRLLIREKDKFPYYLMRYIVDFGVLPC |
| | | ITFKQNDYSTKEGRGQFHYQDAAVAQEERCYNFVVRNGNVYYS |
| | | YMPQAQNVVRISELQGTISVEELRNMVYASINGKDVNKSVEQY |
| | | LLYHLHLLYEKITISGQTIKEGRVDVEDYRPLLDKLLLRPASN |
| | | GEELRRELRKLLPKRVCDLLSNRFDCSEGVSAVEKRLKAILLR |
| | | HEQLLLSQNPALHIDKIKSVIDYLYLFFSDDEKFRQQPTEKAH |
| | | RGLKDEEFQMYHYLVGDYDSHPLALWKELEASGRLKPEMRKLT |
| | | SATSLHGLYMLCLKGTVEWCRKQLMSIGKGTAKVEAIADRVGL |
| | | KLYDKLKEYTPEQLEREVKLVVMHGYAAAATPKPKAQAAIPSK |
| | | LTELRFYSFLGKREMSFAAFIRQDKKAQKLWLRNFYTVENIKT |
| | | LQKRQAAADAACKKLYNLVGEVERVHTNDKVLVLVAQRYRERL |
| | | LNVGSKCAVTLDNPERQQKLADVYEVQNAWLSIRFDDLDFTLT |
| | | HVNLSNLRKAYNLIPRKHILAFKEYLDNRVKQKLCEECRNVRR |
| | | KEDLCTCCSPRYSNLTSWLKENHSESSIEREAATMMLLDVERK |
| | | LLSFLLDERRKAIIEYGKFIPFSALVKECRLADAGLCGIRNDV |
| | | LHDNVISYADAIGKLSAYFPKEASEAVEYIRRTKEVREQRREE |
| | | LMANSSQ |
| Prevotella sp. | 7 | MSKECKKQRQEKKRRLQKANFSISLTGKHVFGAYFNMARTNFV |
| MA2016 | | KTINYILPIAGVRGNYSENQINKMLHALFLIQAGRNEELTTEQ |
| | | KQWEKKLRLNPEQQTKFQKLLFKHFPVLGPMMADVADHKAYL |
| | | NKKKSTVQTEDETFAMLKGVSLADCLDIICLMADTLTECRNFY |
| | | THKDPYNKPSQLADQYLHQEMIAKKLDKVVVASRRILKDREGL |
| | | SVNEVEFLTGIDHLHQEVLKDEFGNAKVKDGKVMKTFVEYDD |
| | | FYFKISGKRLVNGYTVTTKDDKPVNVNTMLPALSDFGLLYFCV |
| | | LFLSKPYAKLFIDEVRLFEYSPFDDKENMIMSEMLSIYRIRTP |
| | | RLHKIDSHDSKATLAMDIFGELRRCPMELYNLLDKNAGQPFFH |
| | | DEVKHPNSHTPDVSKRLRYDDRFPTLALRYIDETELFKRIRFQ |
| | | LQLGSFRYKFYDKENCIDGRVRVRRIQKEINGYGRMQEVADKR |
| | | MDKWGDLIQKREERSVKLEHEELYINLDQFLEDTADSTPYVTD |
| | | ARRPYNIHANRIGLYWEDSQNPKQYKVFDENGMYIPELVVTED |
| | | KKAPIKMPAPRCALSVYDLPAMLFYEYLREQQDNEFPSAEQVI |
| | | IEYEDDYRKFFKAVAEGKLKPFKRPKEFRDFLKKEYPKLRMAD |
| | | IPKKLQLFLCSHGLCYNNKPETVYERLDRLTLQHLEERELHIQ |
| | | NRLEHYQKDRDMIGNKDNQYGKKSFSDVRHGALARYLAQSMME |
| | | WQPTKLKDKEKGHDKLTGLNYNVLTAYLATYGHPQVPEEGFTP |
| | | RTLEQVLINAHLIGGSNPHPFINKVLALGNRNIEELYLHYLEE |
| | | ELKHIRSRIQSLSSNPSDKALSALPFIHHDRMRYHERTSEEMM |
| | | ALAARYTTIQLPDGLFTPYILEILQKHYTENSDLQNALSQDVP |
| | | VKLNPTCNAAYLITLFYQTVLKDNAQPFYLSDKTYTRNKDGEK |
| | | AESFSFKRAYELFSVLNNNKKDTFPFEMIPLFLTSDEIQERLS |
| | | AKLLDGDGNPVPEVGEKGKPATDSQGNTIWKRRIYSEVDDYAE |
| | | KLTDRDMKISFKGEWEKLPRWKQDKIIKRRDETRRQMRDELLQ |
| | | RMPRYIRDIKDNERTLRRYKTQDMVLFLLAEKMFTNIISEQSS |
| | | EFNWKQMRLSKVCNEAFLRQTLTFRVPVTVGETTIYVEQENMS |
| | | LKNYGEFYRFLTDDRLMSLLNNIVETLKPNENGDLVIRHTDLM |
| | | SELAAYDQYRSTIFMLIQSIENLIITNNAVLDDPDADGFWVRE |
| | | DLPKRNNFASLLELINQLNNVELTDDERKLLVAIRNAFSHNSY |
| | | NIDFSLIKDVKHLPEVAKGILQHLQSMLGVEITK |
| Riemerella | 8 | MEKPLLPNVYTLKHKFFWGAFLNIARHNAFITICHINEQLGLK |
| anatipestifer | | TPSNDDKIVDVVCETWNNILNNDHDLLKKSQLTELILKHFPFL |
| | | TAMCYHPPKKEGKKKGHQKEQQKEKESEAQSQAEALNPSKLIE |
| | | ALEILVNQLHSLRNYYSHYKHKKPDAEKDIFKHLYKAFDASLR |
| | | MVKEDYKAHFTVNLTRDFAHLNRKGKNKQDNPDFNRYRFEKDG |
| | | FFTESGLLFFTNLFLDKRDAYWMLKKVSGFKASHKQREKMTTE |
| | | VFCRSRILLPKLRLESRYDHNQMLLDMLSELSRCPKLLYEKLS |
| | | EENKKHFQVEADGFLDEIEEEQNPFKDTLIRHQDRFPYFALRY |
| | | LDLNESFKSIRFQVDLGTYHYCIYDKKIGDEQEKRHLTRTLLS |
| | | FGRLQDFTEINRPQEWKALTKDLDYKETSNQPFISKTTPHYHI |
| | | TDNKIGFRLGTSKELYPSLEIKDGANRIAKYPYNSGFVAHAFI |
| | | SVHELLPLMFYQHLTGKSEDLLKETVRHIQRIYKDFEEERINT |
| | | IEDLEKANQGRLPLGAFPKQMLGLLQNKQPDLSEKAKIKIEKL |
| | | IAETKLLSHRLNTKLKSSPKLGKRREKLIKTGVLADWLVKDFM |
| | | RFQPVAYDAQNQPIKSSKANSTEFWEIRRALALYGGEKNRLEG |
| | | YEKQTNLIGNTNPHPELNKENWKACRNLVDEYQQYLEQREKEL |
| | | EAIKNQPWEPYQYCLLLKIPKENRKNLVKGWEQGGISLPRGLF |
| | | TEAIRETLSEDLMLSKPIRKEIKKHGRVGFISRAITLYFKEKY |
| | | QDKHQSFYNLSYKLEAKAPLLKREEHYEYWQQNKPQSPTESQR |
| | | LELHTSDRWKDYLLYKRWQHLEKKLRLYRNQDVMLWLMTLELT |
| | | KNHFKELNLNYHQLKLENLAVNVQEADAKLNPLNQTLPMVLPV |
| | | KVYPATAFGEVQYHKTPIRTVYIREEHTKALKMGNEKALVKDR |
| | | RLNGLESFIKEENDTQKHPISQLRLRRELEIYQSLRVDAFKET |
| | | LSLEEKLLNKHTSLSSLENEFRALLEEWKKEYAASSMVTDEHI |
| | | AFIASVRNAFCHNQYPFYKEALHAPIPLFTVAQPTTEEKDGLG |
| | | IAEALLKVLREYCEIVKSQI |
| Prevotella | 9 | MEDDKKTTGSISYELKDKHFWAAFLNLARHNVYITINHINKLL |
| aurantiaca | | EIREIDNDEKVLDIKTLWQKGNKDLNQKARLRELMTKHFPFLE |
| | | TAIYTKNKEDKKEVKQEKQAEAQSLESLKDCLFLFLDKLQEAR |
| | | NYYSHYKYSEFSKEPEFEEGLLEKMYNIFGNNIQLVINDYQHN |
| | | KDINPDEDEKHLDRKGQFKYSFADNEGNITESGLLEFVSLFLE |
| | | KKDAIWMQQKLNGEKDNLENKKKMTHEVECRSRILMPKLRLES |
| | | TQTQDWILLDMLNELIRCPKSLYERLQGDDREKEKVPFDPADE |
| | | DYNAEQEPEKNTLIRHQDREPYFVLRYEDYNEIEKNLREQIDL |
| | | GTYHFSIYKKLIGGQKEDRHLTHKLYGFERIQEFAKQNRPDEW |
| | | KAIVKDLDTYETSNKRYISETTPHYHLENQKIGIRERNGNKEI |
| | | WPSLKTNDENNEKSKYKLDKQYQAEAFLSVHELLPMMFYYLLL |
| | | KKEKPNNDEINASIVEGFIKREIRNIFKLYDAFANGEINNIDD |
| | | LEKYCADKGIPKRHLPKQMVAILYDEHKDMVKEAKRKQKEMVK |
| | | DTKKLLATLEKQTQKEKEDDGRNVKLLKSGEIARWLVNDMMRE |
| | | QPVQKDNEGKPLNNSKANSTEYQMLQRSLALYNNEEKPTRYFR |
| | | QVNLIESNNPHPFLKWTKWEECNNILTFYYSYLTKKIEFLNKL |
| | | KPEDWKKNQYFLKLKEPKTNRETLVQGWKNGENLPRGIFTEPI |
| | | REWFKRHQNNSKEYEKVEALDRVGLVTKVIPLEEKEEYEKDKE |
| | | ENEKEDTQKEINDCVQPEYNEPYNVGNIHKPKEKDELHREERI |
| | | ELWDKKKDKFKGYKEKIKSKKLTEKDKEEFRSYLEFQSWNKFE |
| | | RELRLVRNQDIVTWLLCKELIDKLKIDELNIEELKKLRLNNID |
| | | TDTAKKEKNNILNRVMPMELPVTVYEIDDSHKIVKDKPLHTIY |
| | | IKEAETKLLKQGNFKALVKDRRLNGLFSFVKTNSEAESKRNPI |
| | | SKLRVEYELGEYQEARIETIQDMLALEEKLINKYKDLPTNKES |
| | | EMLNSWLEGKDEADKARFQNDVDELIAVRNAFSHNQYPMHNKI |
| | | EFANIKPFSLYTANNSEEKGLGIANQLKDKTKETTDKIKKIEK |
| | | PIETKE |
| Prevotella | 10 | MEDKPFWAAFFNLARHNVYLTVNHINKLLDLEKLYDEGKHKEI |
| saccharolytica | | FEREDIFNISDDVMNDANSNGKKRKLDIKKIWDDLDTDLTRKY |
| | | QLRELILKHFPFIQPAIIGAQTKERTTIDKDKRSTSTSNDSLK |
| | | QTGEGDINDLLSLSNVKSMEERLLQILEQLRNYYSHVKHSKSA |
| | | TMPNEDEDLLNWMRYIEIDSVNKVKEDYSSNSVIDPNTSFSHL |
| | | IYKDEQGKIKPCRYPFTSKDGSINAFGLLEFVSLFLEKQDSIW |
| | | MQKKIPGFKKASENYMKMTNEVFCRNHILLPKIRLETVYDKDW |
| | | MLLDMLNEVVRCPLSLYKRLTPAAQNKFKVPEKSSDNANRQED |
| | | DNPFSRILVRHQNRFPYEVLREEDLNEVFTTLRFQINLGCYHF |
| | | AICKKQIGDKKEVHHLIRTLYGFSRLQNFTQNTRPEEWNTLVK |
| | | TTEPSSGNDGKTVQGVPLPYISYTIPHYQIENEKIGIKIFDGD |
| | | TAVDTDIWPSVSTEKQLNKPDKYTLTPGFKADVFLSVHELLPM |
| | | MFYYQLLLCEGMLKTDAGNAVEKVLIDTRNAIFNLYDAFVQEK |
| | | INTITDLENYLQDKPILIGHLPKQMIDLLKGHQRDMLKAVEQK |
| | | KAMLIKDTERRLKLLDKQLKQETDVAAKNTGTLLKNGQIADWL |
| | | VNDMMRFQPVKRDKEGNPINCSKANSTEYQMLQRAFAFYATDS |
| | | CRLSRYFTQLHLIHSDNSHLFLSRFEYDKQPNLIAFYAAYLKA |
| | | KLEFLNELQPQNWASDNYFLLLRAPKNDRQKLAEGWKNGFNLP |
| | | RGLFTEKIKTWFNEHKTIVDISDCDIFKNRVGQVARLIPVFFD |
| | | KKFKDHSQPFYRYDFNVGNVSKPTEANYLSKGKREELFKSYQN |
| | | KFKNNIPAEKTKEYREYKNFSLWKKFERELRLIKNQDILIWLM |
| | | CKNLFDEKIKPKKDILEPRIAVSYIKLDSLQTNTSTAGSLNAL |
| | | AKVVPMTLAIHIDSPKPKGKAGNNEKENKEFTVYIKEEGTKLL |
| | | KWGNFKTLLADRRIKGLFSYIEHDDIDLKQHPLTKRRVDLELD |
| | | LYQTCRIDIFQQTLGLEAQLLDKYSDLNTDNFYQMLIGWRKKE |
| | | GIPRNIKEDTDFLKDVRNAFSHNQYPDSKKIAFRRIRKFNPKE |
| | | LILEEEEGLGIATQMYKEVEKVVNRIKRIELFD |
| HMPREF9712_ | 11 | MKDILTTDTTEKQNRFYSHKIADKYFFGGYFNLASNNIYEVFE |
| 03108 | | EVNKRNTFGKLAKRDNGNLKNYIIHVFKDELSISDFEKRVAIF |
| [Myroides | | ASYFPILETVDKKSIKERNRTIDLTLSQRIRQFREMLISLVTA |
| odoratimimus | | VDQLRNFYTHYHHSDIVIENKVLDFLNSSFVSTALHVKDKYLK |
| CCUG 10230] | | TDKTKEFLKETIAAELDILIEAYKKKQIEKKNTRFKANKREDI |
| | | LNAIYNEAFWSFINDKDKDKDKETVVAKGADAYFEKNHHKSND |
| | | PDFALNISEKGIVYLLSFFLTNKEMDSLKANLTGFKGKVDRES |
| | | GNSIKYMATQRIYSFHTYRGLKQKIRTSEEGVKETLLMQMIDE |
| | | LSKVPNVVYQHLSTTQQNSFIEDWNEYYKDYEDDVETDDLSRV |
| | | IHPVIRKRYEDRFNYFAIRFLDEFFDFPTLRFQVHLGDYVHDR |
| | | RTKQLGKVESDRIIKEKVTVFARLKDINSAKASYFHSLEEQDK |
| | | EELDNKWTLFPNPSYDFPKEHTLQHQGEQKNAGKIGIYVKLRD |
| | | TQYKEKAALEEARKSLNPKERSATKASKYDIITQIIEANDNVK |
| | | SEKPLVFTGQPIAYLSMNDIHSMLFSLLTDNAELKKTPEEVEA |
| | | KLIDQIGKQINEILSKDTDTKILKKYKDNDLKETDTDKITRDL |
| | | ARDKEEIEKLILEQKQRADDYNYTSSTKFNIDKSRKRKHLLFN |
| | | AEKGKIGVWLANDIKRFMFKESKSKWKGYQHTELQKLFAYFDT |
| | | SKSDLELILSNMVMVKDYPIELIDLVKKSRTLVDFLNKYLEAR |
| | | LEYIENVITRVKNSIGTPQFKTVRKECFTFLKKSNYTVVSLDK |
| | | QVERILSMPLFIERGFMDDKPTMLEGKSYKQHKEKFADWFVHY |
| | | KENSNYQNFYDTEVYEITTEDKREKAKVTKKIKQQQKNDVFTL |
| | | MMVNYMLEEVLKLSSNDRLSLNELYQTKEERIVNKQVAKDTQE |
| | | RNKNYIWNKVVDLQLCDGLVHIDNVKLKDIGNFRKYENDSRVK |
| | | EFLTYQSDIVWSAYLSNEVDSNKLYVIERQLDNYESIRSKELL |
| | | KEVQEIECSVYNQVANKESLKQSGNENFKQYVLQGLLPIGMDV |
| | | REMLILSTDVKFKKEEIIQLGQAGEVEQDLYSLIYIRNKFAHN |
| | | QLPIKEFFDFCENNYRSISDNEYYAEYYMEIFRSIKEKYAN |
| Prevotella | 12 | MEDDKKTTDSIRYELKDKHFWAAFLNLARHNVYITVNHINKIL |
| intermedia | | EEDEINRDGYENTLENSWNEIKDINKKDRLSKLIIKHFPFLEA |
| | | TTYRQNPTDTTKQKEEKQAEAQSLESLKKSFFVFIYKLRDLRN |
| | | HYSHYKHSKSLERPKFEEDLQNKMYNIFDVSIQFVKEDYKHNT |
| | | DINPKKDFKHLDRKRKGKFHYSFADNEGNITESGLLFFVSLFL |
| | | EKKDAIWVQKKLEGFKCSNKSYQKMTNEVFCRSRMLLPKLRLE |
| | | STQTQDWILLDMLNELIRCPKSLYERLQGVNRKKFYVSFDPAD |
| | | EDYDAEQEPFKNTLVRHQDRFPYFALRYFDYNEVFANLRFQID |
| | | LGTYHFSIYKKLIGGQKEDRHLTHKLYGFERIQEFDKQNRPDE |
| | | WKAIVKDSDTFKKKEEKEEEKPYISETTPHYHLENKKIGIAFK |
| | | NHNIWPSTQTELTNNKRKKYNLGTSIKAEAFLSVHELLPMMFY |
| | | YLLLKTENTKNDNKVGGKKETKKQGKHKIEAIIESKIKDIYAL |
| | | YDAFANGEINSEDELKEYLKGKDIKIVHLPKQMIAILKNEHKD |
| | | MAEKAEAKQEKMKLATENRLKTLDKQLKGKIQNGKRYNSAPKS |
| | | GEIASWLVNDMMRFQPVQKDENGESLNNSKANSTEYQLLQRTL |
| | | AFFGSEHERLAPYFKQTKLIESSNPHPFLNDTEWEKCSNILSF |
| | | YRSYLKARKNFLESLKPEDWEKNQYFLMLKEPKTNRETLVQGW |
| | | KNGFNLPRGFFTEPIRKWFMEHWKSIKVDDLKRVGLVAKVTPL |
| | | FFSEKYKDSVQPFYNYPFNVGDVNKPKEEDFLHREERIELWDK |
| | | KKDKFKGYKAKKKFKEMTDKEKEEHRSYLEFQSWNKFERELRL |
| | | VRNQDIVTWLLCTELIDKLKIDELNIKELKKLRLKDINTDTAK |
| | | KEKNNILNRVMPMELPVTVYKVNKGGYIIKNKPLHTIYIKEAE |
| | | TKLLKQGNFKALVKDRRLNGLFSFVKTPSEAESESNPISKLRV |
| | | EYELGKYQNARLDIIEDMLALEKKLIDKYNSLDTDNFHNMLTG |
| | | WLELKGEAKKARFQNDVKLLTAVRNAFSHNQYPMYDENLFGNI |
| | | ERFSLSSSNIIESKGLDIAAKLKEEVSKAAKKIQNEEDNKKEK |
| | | ET |
| Capnocytophaga | 13 | MKNIQRLGKGNEFSPFKKEDKFYFGGFLNLANNNIEDFFKEII |
| canimorsus | | TRFGIVITDENKKPKETFGEKILNEIFKKDISIVDYEKWVNIF |
| | | ADYFPFTKYLSLYLEEMQFKNRVICFRDVMKELLKTVEALRNF |
| | | YTHYDHEPIKIEDRVFYFLDKVLLDVSLTVKNKYLKTDKTKEF |
| | | LNQHIGEELKELCKQRKDYLVGKGKRIDKESEIINGIYNNAFK |
| | | DFICKREKQDDKENHNSVEKILCNKEPQNKKQKSSATVWELCS |
| | | KSSSKYTEKSFPNRENDKHCLEVPISQKGIVFLLSFFLNKGEI |
| | | YALTSNIKGFKAKITKEEPVTYDKNSIRYMATHRMFSFLAYKG |
| | | LKRKIRTSEINYNEDGQASSTYEKETLMLQMLDELNKVPDVVY |
| | | QNLSEDVQKTFIEDWNEYLKENNGDVGTMEEEQVIHPVIRKRY |
| | | EDKFNYFAIRFLDEFAQFPTLRFQVHLGNYLCDKRTKQICDTT |
| | | TEREVKKKITVFGRLSELENKKAIFLNEREEIKGWEVFPNPSY |
| | | DFPKENISVNYKDFPIVGSILDREKQPVSNKIGIRVKIADELQ |
| | | KREIDKAIKEKKLRNPKNRANQDEKQKERLVNEIVSTNSNEQG |
| | | EPVVFIGQPTAYLSMNDIHSVLYEFLINKISGEALETKIVEKI |
| | | NSETQIKQIIGKDATTKILKPYTNANSINREKLLRDLEQEQQI |
| | | LKTLLEEQQQREKDKKDKKSKRKHELYPSEKGKVAVWLANDIK |
| | | RFMPKAFKEQWRGYHHSLLQKYLAYYEQSKEELKNLLPKEVFK |
| | | HFPFKLKGYFQQQYLNQFYTDYLKRRLSYVNELLLNIQNFKND |
| | | KDALKATEKECFKFFRKQNYIINPINIQIQSILVYPIFLKRGF |
| | | LDEKPTMIDREKFKENKDTELADWFMHYKNYKEDNYQKFYAYP |
| | | LEKVEEKEKFKRNKQINKQKKNDVYTLMMVEYIIQKIFGDKFV |
| | | EENPLVLKGIFQSKAERQQNNTHAATTQERNLNGILNQPKDIK |
| | | IQGKITVKGVKLKDIGNFRKYEIDQRVNTFLDYEPRKEWMAYL |
| | | PNDWKEKEKQGQLPPNNVIDRQISKYETVRSKILLKDVQELEK |
| | | IISDEIKEEHRHDLKQGKYYNFKYYILNGLLRQLKNENVENYK |
| | | VFKLNTNPEKVNITQLKQEATDLEQKAFVLTYIRNKFAHNQLP |
| | | KKEFWDYCQEKYGKIEKEKTYAEYFAEVFKREKEALIK |
| Porphyromonas | 14 | MTEQSERPYNGTYYTLEDKHFWAAFLNLARHNAYITLTHIDRQ |
| gulae | | LAYSKADITNDQDVLSFKALWKNFDNDLERKSRLRSLILKHFS |
| | | FLEGAAYGKKLFESKSSGNKSSKNKELTKKEKEELQANALSLD |
| | | NLKSILFDFLQKLKDFRNYYSHYRHSGSSELPLFDGNMLQRLY |
| | | NVFDVSVQRVKIDHEHNDEVDPHYHFNHLVRKGKKDRYGHNDN |
| | | PSFKHHFVDGEGMVTEAGLLFFVSLFLEKRDAIWMQKKIRGFK |
| | | GGTETYQQMTNEVFCRSRISLPKLKLESLRMDDWMLLDMLNEL |
| | | VRCPKPLYDRLREDDRACFRVPVDILPDEDDTDGGGEDPFKNT |
| | | LVRHQDRFPYFALRYFDLKKVFTSLRFHIDLGTYHFAIYKKMI |
| | | GEQPEDRHLTRNLYGFGRIQDFAEEHRPEEWKRLVRDLDYFET |
| | | GDKPYISQTSPHYHIEKGKIGLRFMPEGQHLWPSPEVGTTRTG |
| | | RSKYAQDKRLTAEAFLSVHELMPMMFYYFLLREKYSEEVSAER |
| | | VQGRIKRVIEDVYAVYDAFARDEINTRDELDACLADKGIRRGH |
| | | LPRQMIAILSQEHKDMEEKIRKKLQEMMADTDHRLDMLDRQTD |
| | | RKIRIGRKNAGLPKSGVIADWLVRDMMRFQPVAKDASGKPLNN |
| | | SKANSTEYRMLQRALALFGGEKERLTPYFRQMNLTGGNNPHPF |
| | | LHETRWESHTNILSFYRSYLRARKAFLERIGRSDRVENRPFLL |
| | | LKEPKTDRQTLVAGWKGEFHLPRGIFTEAVRDCLIEMGHDEVA |
| | | SYKEVGFMAKAVPLYFERACEDRVQPFYDSPFNVGNSLKPKKG |
| | | RFLSKEERAEEWERGKERFRDLEAWSYSAARRIEDAFAGIEYA |
| | | SPGNKKKIEQLLRDLSLWEAFESKLKVRADRINLAKLKKEILE |
| | | AQEHPYHDFKSWQKFERELRLVKNQDIITWMMCRDLMEENKVE |
| | | GLDTGTLYLKDIRPNVQEQGSLNVLNRVKPMRLPVVVYRADSR |
| | | GHVHKEEAPLATVYIEERDTKLLKQGNFKSFVKDRRLNGLFSF |
| | | VDTGGLAMEQYPISKLRVEYELAKYQTARVCVFELTLRLEESL |
| | | LTRYPHLPDESFREMLESWSDPLLAKWPELHGKVRLLIAVRNA |
| | | FSHNQYPMYDEAVFSSIRKYDPSSPDAIEERMGLNIAHRLSEE |
| | | VKQAKETVERIIQA |
| Prevotella sp. | 15 | MNIPALVENQKKYFGTYSVMAMLNAQTVLDHIQKVADIEGEQN |
| P5-125 | | ENNENLWFHPVMSHLYNAKNGYDKQPEKTMFIIERLQSYFPF |
| | | LKIMAENQREYSNGKYKQNRVEVNSNDIFEVLKRAFGVLKMY |
| | | RDLTNHYKTYEEKLNDGCEFLTSTEQPLSGMINNYYTVALRNM |
| | | NERYGYKTEDLAFIQDKRFKFVKDAYGKKKSQVNTGFFLSLQD |
| | | YNGDTQKKLHLSGVGIALLICLFLDKQYINIFLSRLPIFSSYN |
| | | AQSEERRIIIRSFGINSIKLPKDRIHSEKSNKSVAMDMLNEVK |
| | | RCPDELFTTLSAEKQSRFRIISDDHNEVLMKRSSDRFVPLLLQ |
| | | YIDYGKLFDHIRFHVNMGKLRYLLKADKTCIDGQTRVRVIEQP |
| | | LNGFGRLEEAETMRKQENGTFGNSGIRIRDFENMKRDDANPAN |
| | | YPYIVDTYTHYILENNKVEMFINDKEDSAPLLPVIEDDRYVVK |
| | | TIPSCRMSTLEIPAMAFHMFLFGSKKTEKLIVDVHNRYKRLFQ |
| | | AMQKEEVTAENIASFGIAESDLPQKILDLISGNAHGKDVDAFI |
| | | RLTVDDMLTDTERRIKRFKDDRKSIRSADNKMGKRGFKQISTG |
| | | KLADFLAKDIVLFQPSVNDGENKITGLNYRIMQSAIAVYDSGD |
| | | DYEAKQQFKLMFEKARLIGKGTTEPHPFLYKVFARSIPANAVE |
| | | FYERYLIERKFYLTGLSNEIKKGNRVDVPFIRRDQNKWKTPAM |
| | | KTLGRIYSEDLPVELPRQMFDNEIKSHLKSLPQMEGIDFNNAN |
| | | VTYLIAEYMKRVLDDDFQTFYQWNRNYRYMDMLKGEYDRKGSL |
| | | QHCFTSVEEREGLWKERASRTERYRKQASNKIRSNRQMRNASS |
| | | EEIETILDKRLSNSRNEYQKSEKVIRRYRVQDALLFLLAKKTL |
| | | TELADFDGERFKLKEIMPDAEKGILSEIMPMSFTFEKGGKKYT |
| | | ITSEGMKLKNYGDFFVLASDKRIGNLLELVGSDIVSKEDIMEE |
| | | FNKYDQCRPEISSIVFNLEKWAFDTYPELSARVDREEKVDFKS |
| | | ILKILLNNKNINKEQSDILRKIRNAFDHNNYPDKGVVEIKALP |
| | | EIAMSIKKAFGEYAIMK |
| Flavobacterium | 16 | MENLNKILDKENEICISKIFNTKGIAAPITEKALDNIKSKQKN |
| branchiophilum | | DLNKEARLHYFSIGHSFKQIDTKKVFDYVLIEELKDEKPLKFI |
| | | TLQKDFFTKEFSIKLQKLINSIRNINNHYVHNFNDINLNKIDS |
| | | NVFHFLKESFELAIIEKYYKVNKKYPLDNEIVLFLKELFIKDE |
| | | NTALLNYFTNLSKDEAIEYILTFTITENKIWNINNEHNILNIE |
| | | KGKYLTFEAMLFLITIFLYKNEANHLLPKLYDFKNNKSKQELF |
| | | TFFSKKFTSQDIDAEEGHLIKFRDMIQYLNHYPTAWNNDLKLE |
| | | SENKNKIMTTKLIDSIIEFELNSNYPSFATDIQFKKEAKAFLF |
| | | ASNKKRNQTSFSNKSYNEEIRHNPHIKQYRDEIASALTPISFN |
| | | VKEDKFKIFVKKHVLEEYFPNSIGYEKFLEYNDFTEKEKEDFG |
| | | LKLYSNPKTNKLIERIDNHKLVKSHGRNQDRFMDFSMRFLAEN |
| | | NYFGKDAFFKCYKFYDTQEQDEFLQSNENNDDVKFHKGKVTTY |
| | | IKYEEHLKNYSYWDCPFVEENNSMSVKISIGSEEKILKIQRNL |
| | | MIYFLENALYNENVENQGYKLVNNYYRELKKDVEESIASLDLI |
| | | KSNPDFKSKYKKILPKRLLHNYAPAKQDKAPENAFETLLKKAD |
| | | FREEQYKKLLKKAEHEKNKEDFVKRNKGKQFKLHFIRKACQMM |
| | | YFKEKYNTLKEGNAAFEKKDPVIEKRKNKEHEFGHHKNLNITR |
| | | EEFNDYCKWMFAFNGNDSYKKYLRDLFSEKHFFDNQEYKNLFE |
| | | SSVNLEAFYAKTKELFKKWIETNKPTNNENRYTLENYKNLILQ |
| | | KQVFINVYHFSKYLIDKNLLNSENNVIQYKSLENVEYLISDFY |
| | | FQSKLSIDQYKTCGKLFNKLKSNKLEDCLLYEIAYNYIDKKNV |
| | | HKIDIQKILTSKIILTINDANTPYKISVPFNKLERYTEMIAIK |
| | | NQNNLKARFLIDLPLYLSKNKIKKGKDSAGYEIIIKNDLEIED |
| | | INTINNKIINDSVKFTEVLMELEKYFILKDKCILSKNYIDNSE |
| | | IPSLKQFSKVWIKENENEIINYRNIACHFHLPLLETFDNLLLN |
| | | VEQKFIKEELQNVSTINDLSKPQEYLILLFIKFKHNNFYLNLF |
| | | NKNESKTIKNDKEVKKNRVLQKFINQVILKKK |
| Myroides | 17 | MKDILTTDTTEKQNRFYSHKIADKYFFGGYFNLASNNIYEVFE |
| odoratimimus | | EVNKRNTFGKLAKRDNGNLKNYIIHVFKDELSISDFEKRVAIF |
| | | ASYFPILETVDKKSIKERNRTIDLTLSQRIRQFREMLISLVTA |
| | | VDQLRNFYTHYHHSDIVIENKVLDFLNSSFVSTALHVKDKYLK |
| | | TDKTKEFLKETIAAELDILIEAYKKKQIEKKNTRFKANKREDI |
| | | LNAIYNEAFWSFINDKDKDKDKETVVAKGADAYFEKNHHKSND |
| | | PDFALNISEKGIVYLLSFFLTNKEMDSLKANLTGFKGKVDRES |
| | | GNSIKYMATQRIYSFHTYRGLKQKIRTSEEGVKETLLMQMIDE |
| | | LSKVPNVVYQHLSTTQQNSFIEDWNEYYKDYEDDVETDDLSRV |
| | | THPVIRKRYEDRFNYFAIRFLDEFFDFPTLRFQVHLGDYVHDR |
| | | RTKQLGKVESDRIIKEKVTVFARLKDINSAKASYFHSLEEQDK |
| | | EELDNKWTLFPNPSYDFPKEHTLQHQGEQKNAGKIGIYVKLRD |
| | | TQYKEKAALEEARKSLNPKERSATKASKYDIITQIIEANDNVK |
| | | SEKPLVFTGQPIAYLSMNDIHSMLFSLLTDNAELKKTPEEVEA |
| | | KLIDQIGKQINEILSKDTDTKILKKYKDNDLKETDTDKITRDL |
| | | ARDKEEIEKLILEQKQRADDYNYTSSTKFNIDKSRKRKHLLFN |
| | | AEKGKIGVWLANDIKRFMFKESKSKWKGYQHIELQKLFAYFDT |
| | | SKSDLELILSNMVMVKDYPIELIDLVKKSRTLVDFLNKYLEAR |
| | | LEYIENVITRVKNSIGTPQFKTVRKECFTFLKKSNYTVVSLDK |
| | | QVERILSMPLFIERGFMDDKPTMLEGKSYKQHKEKFADWFVHY |
| | | KENSNYQNFYDTEVYEITTEDKREKAKVTKKIKQQQKNDVFTL |
| | | MMVNYMLEEVLKLSSNDRLSLNELYQTKEERIVNKQVAKDTQE |
| | | RNKNYIWNKVVDLQLCDGLVHIDNVKLKDIGNFRKYENDSRVK |
| | | EFLTYQSDIVWSAYLSNEVDSNKLYVIERQLDNYESIRSKELL |
| | | KEVQEIECSVYNQVANKESLKQSGNENFKQYVLQGLLPIGMDV |
| | | REMLILSTDVKFKKEEIIQLGQAGEVEQDLYSLIYIRNKFAHN |
| | | QLPIKEFFDFCENNYRSISDNEYYAEYYMEIFRSIKEKYAN |
| Flavobacterium | 18 | MSSKNESYNKQKTFNHYKQEDKYFFGGFLNNADDNLRQVGKEF |
| columnare | | KTRINFNHINNNELASVFKDYFNKEKSVAKREHALNLLSNYFP |
| | | VLERIQKHTNHNFEQTREIFELLLDTIKKLRDYYTHHYHKPIT |
| | | INPKIYDFLDDTLLDVLITIKKKKVKNDTSRELLKEKLRPELT |
| | | QLKNQKREELIKKGKKLLEENLENAVFNHCLIPFLEENKTDDK |
| | | QNKTVSLRKYRKSKPNEETSITLTQSGLVFLMSFFLHRKEFQV |
| | | FTSGLERFKAKVNTIKEEEISLNKNNIVYMITHWSYSYYNFKG |
| | | LKHRIKTDQGVSTLEQNNTTHSLTNTNTKEALLTQIVDYLSKV |
| | | PNEIYETLSEKQQKEFEEDINEYMRENPENEDSTFSSIVSHKV |
| | | IRKRYENKFNYFAMRFLDEYAELPTLRFMVNFGDYIKDRQKKI |
| | | LESIQFDSERIIKKEIHLFEKLSLVTEYKKNVYLKETSNIDLS |
| | | RFPLFPNPSYVMANNNIPFYIDSRSNNLDEYLNQKKKAQSQNK |
| | | KRNLTFEKYNKEQSKDAIIAMLQKEIGVKDLQQRSTIGLLSCN |
| | | ELPSMLYEVIVKDIKGAELENKIAQKIREQYQSIRDFTLDSPQ |
| | | KDNIPTTLIKTINTDSSVTFENQPIDIPRLKNALQKELTLTQE |
| | | KLLNVKEHEIEVDNYNRNKNTYKFKNQPKNKVDDKKLQRKYVF |
| | | YRNEIRQEANWLASDLIHFMKNKSLWKGYMHNELQSFLAFFED |
| | | KKNDCIALLETVFNLKEDCILTKGLKNLFLKHGNFIDFYKEYL |
| | | KLKEDFLSTESTFLENGFIGLPPKILKKELSKRLKYIFIVFQK |
| | | RQFIIKELEEKKNNLYADAINLSRGIFDEKPTMIPFKKPNPDE |
| | | FASWFVASYQYNNYQSFYELTPDIVERDKKKKYKNLRAINKVK |
| | | IQDYYLKLMVDTLYQDLFNQPLDKSLSDFYVSKAEREKIKADA |
| | | KAYQKLNDSSLWNKVIHLSLQNNRITANPKLKDIGKYKRALQD |
| | | EEKIATLLTYDARTWTYALQKPEKNENDYKELHYTALNMELQE |
| | | FYEKVRSKELLKQVQELEKKILDKYDFSNNASHPEDLEIEDKK |
| | | GKRHPNFKLYITKALLKNESEIINLENIDIEILLKYYDYNTEE |
| | | LKEKIKNMDEDEKAKIINTKENYNKITNVLIKKALVLIIIRNK |
| | | MAHNQYPPKFIYDLANRFVPKKEEEYFATYFNRVFETITKELW |
| | | ENKEKKDKTQV |
| Porphyromonas | 19 | MTEQNEKPYNGTYYTLEDKHFWAAFLNLARHNAYITLAHIDRQ |
| gingivalis | | LAYSKADITNDEDILFFKGQWKNLDNDLERKARLRSLILKHFS |
| | | FLEGAAYGKKLFESQSSGNKSSKKKELSKKEKEELQANALSLD |
| | | NLKSILFDFLQKLKDFRNYYSHYRHPESSELPLFDGNMLQRLY |
| | | NVFDVSVQRVKRDHEHNDKVDPHRHFNHLVRKGKKDKYGNNDN |
| | | PFFKHHFVDREGTVTEAGLLFFVSLFLEKRDAIWMQKKIRGFK |
| | | GGTEAYQQMTNEVFCRSRISLPKLKLESLRTDDWMLLDMLNEL |
| | | VRCPKSLYDRLREEDRARFRVPVDILSDEDDTDGTEEDPFKNT |
| | | LVRHQDRFPYFALRYFDLKKVFTSLRFHIDLGTYHFAIYKKNI |
| | | GEQPEDRHLTRNLYGFGRIQDFAEEHRPEEWKRLVRDLDYFET |
| | | GDKPYITQTTPHYHIEKGKIGLRFVPEGQHLWPSPEVGATRTG |
| | | RSKYAQDKRLTAEAFLSVHELMPMNIFYYFLLREKYSEEVSAE |
| | | KVQGRIKRVIEDVYAVYDAFARDEINTRDELDACLADKGIRRG |
| | | HLPRQMIAILSQEHKDMEEKVRKKLQEMIADTDHRLDMLDRQT |
| | | DRKIRIGRKNAGLPKSGVVADWLVRDMMRFQPVAKDTSGKPLN |
| | | NSKANSTEYRMLQRALALFGGEKERLTPYFRQMNLTGGNNPHP |
| | | FLHETRWESHTNILSFYRSYLEARKAFLQSIGRSDRVENHRFL |
| | | LLKEPKTDRQTLVAGWKGEFHLPRGIFTEAVRDCLIEMGYDEV |
| | | GSYKEVGFMAKAVPLYFERASKDRVQPFYDYPFNVGNSLKPKK |
| | | GRFLSKEKRAEEWESGKERFRLAKLKKEILEAKEHPYHDFKSW |
| | | QKFERELRLVKNQDIITWMMCRDLMEENKVEGLDTGTLYLKDI |
| | | RTDVQEQGSLNVLNRVKPMRLPVVVYRADSRGHVHKEQAPLAT |
| | | VYIEERDTKLLKQGNFKSFVKDRRLNGLFSFVDTGALAMEQYP |
| | | ISKLRVEYELAKYQTARVCAFEQTLELEESLLTRYPHLPDKNF |
| | | RKMLESWSDPLLDKWPDLHGNVRLLIAVRNAFSHNQYPMYDET |
| | | LFSSIRKYDPSSPDAIEERMGLNIAHRLSEEVKQAKEMVERII |
| | | QA |
| Porphyromonas | 20 | MTEQSERPYNGTYYTLEDKHFWAAFLNLARHNAYITLTHIDRQ |
| sp. COT-052 | | LAYSKADITNDQDVLSFKALWKNFDNDLERKSRLRSLILKHFS |
| OH4946 | | FLEGAAYGKKLFESKSSGNKSSKNKELTKKEKEELQANALSLD |
| | | NLKSILFDFLQKLKDFRNYYSHYRHSESSELPLFDGNMLQRLY |
| | | NVFDVSVQRVKRDHEHNDKVDPHRHFNHLVRKGKKDRYGHNDN |
| | | PSFKHHFVDSEGMVTEAGLLFFVSLFLEKRDAIWMQKKIRGFK |
| | | GGTETYQQMTNEVFCRSRISLPKLKLESLRTDDWMLLDMLNEL |
| | | VRCPKPLYDRLREDDRACFRVPVDILPDEDDTDGGGEDPFKNT |
| | | LVRHQDRFPYFALRYFDLKKVFTSLRFHIDLGTYHFAIYKKMI |
| | | GEQPEDRHLTRNLYGFGRIQDFAEEHRPEEWKRLVRDLDYFET |
| | | GDKPYISQTTPHYHIEKGKIGLRFVPEGQHLWPSPEVGTTRTG |
| | | RSKYAQDKRLTAEAFLSVHELMPMMFYYFLLREKYSEEVSAEK |
| | | VQGRIKRVIEDVYAIYDAFARDEINTLKELDACLADKGIRRGH |
| | | LPKQMIGILSQERKDMEEKVRKKLQEMIADTDHRLDMLDRQTD |
| | | RKIRIGRKNAGLPKSGVIADWLVRDMMRFQPVAKDTSGKPLNN |
| | | SKANSTEYRMLQRALALFGGEKERLTPYFRQMNLTGGNNPHPF |
| | | LHETRWESHTNILSFYRSYLRARKAFLERIGRSDRVENCPFLL |
| | | LKEPKTDRQTLVAGWKGEFHLPRGIFTEAVRDCLIEMGYDEVG |
| | | SYREVGFMAKAVPLYFERACEDRVQPFYDSPFNVGNSLKPKKG |
| | | RFLSKEDRAEEWERGKERFRDLEAWSHSAARRIKDAFAGIEYA |
| | | SPGNKKKIEQLLRDLSLWEAFESKLKVRADKINLAKLKKEILE |
| | | AQEHPYHDFKSWQKFERELRLVKNQDIITWMMCRDLMEENKVE |
| | | GLDTGTLYLKDIRPNVQEQGSLNVLNRVKPMRLPVVVYRADSR |
| | | GHVHKEEAPLATVYIEERDTKLLKQGNFKSFVKDRRLNGLFSF |
| | | VDTGGLAMEQYPISKLRVEYELAKYQTARVCVFELTLRLEESL |
| | | LSRYPHLPDESFREMLESWSDPLLAKWPELHGKVRLLIAVRNA |
| | | FSHNQYPMYDEAVFSSIRKYDPSSPDAIEERMGLNIAHRLSEE |
| | | VKQAKETVERIIQA |
| Prevotella | 21 | MEDDKKTKESTNMLDNKHFWAAFLNLARHNVYITVNHINKVLE |
| intermedia | | LKNKKDQDIIIDNDQDILAIKTHWEKVNGDLNKTERLRELMTK |
| | | HFPFLETAIYTKNKEDKEEVKQEKQAKAQSFDSLKHCLFLFLE |
| | | KLQEARNYYSHYKYSESTKEPMLEKELLKKMYNIFDDNIQLVI |
| | | KDYQHNKDINPDEDFKHLDRTEEEFNYYFTTNKKGNITASGLL |
| | | FFVSLFLEKKDAIWMQQKLRGFKDNRESKKKMTHEVFCRSRML |
| | | LPKLRLESTQTQDWILLDMLNELIRCPKSLYERLQGEYRKKFN |
| | | VPFDSADEDYDAEQEPFKNTLVRHQDRFPYFALRYFDYNEIFT |
| | | NLRFQIDLGTYHFSIYKKLIGGQKEDRHLTHKLYGFERIQEFA |
| | | KQNRTDEWKAIVKDFDTYETSEEPYISETAPHYHLENQKIGIR |
| | | FRNDNDEIWPSLKTNGENNEKRKYKLDKQYQAEAFLSVHELLP |
| | | MMFYYLLLKKEEPNNDKKNASIVEGFIKREIRDIYKLYDAFAN |
| | | GEINNIDDLEKYCEDKGIPKRHLPKQMVAILYDEHKDMAEEAK |
| | | RKQKEMVKDTKKLLATLEKQTQGEIEDGGRNIRLLKSGEIARW |
| | | LVNDMMRFQPVQKDNEGNPLNNSKANSTEYQMLQRSLALYNKE |
| | | EKPTRYFRQVNLINSSNPHPFLKWTKWEECNNILSFYRSYLTK |
| | | KIEFLNKLKPEDWEKNQYFLKLKEPKTNRETLVQGWKNGFNLP |
| | | RGIFTEPIREWFKRHQNDSEEYEKVETLDRVGLVTKVIPLFFK |
| | | KEDSKDKEEYLKKDAQKEINNCVQPFYGFPYNVGNIHKPDEKD |
| | | FLPSEERKKLWGDKKYKFKGYKAKVKSKKLTDKEKEEYRSYLE |
| | | FQSWNKFERELRLVRNQDIVTWLLCTELIDKLKVEGLNVEELK |
| | | KLRLKDIDTDTAKQEKNNILNRVMPMQLPVTVYEIDDSHNIVK |
| | | DRPLHTVYIEETKTKLLKQGNFKALVKDRRLNGLFSFVDTSSE |
| | | TELKSNPISKSLVEYELGEYQNARIETIKDMLLLEETLIEKYK |
| | | TLPTDNFSDMLNGWLEGKDEADKARFQNDVKLLVAVRNAFSHN |
| | | QYPMRNRIAFANINPFSLSSADTSEEKKLDIANQLKDKTHKII |
| | | KRIIEIEKPIETKE |

TABLE 2

| | | Acces- | | |
|---|---|---|---|---|
| | | sory | | |
| Ortholog | No. | protein | 5′PFS | 3′PFS |
| Bergeyella zoohelcum | 1 | | A | NGA |
| Bergeyella zoohelcum | 1 | csx27 | A | NGA |
| Prevotella intermedia | 2 | | A | NGA |
| Prevotella intermedia | 2 | csx28 | A | NGA |
| Prevotella buccae | 3 | | A | NGA |
| Prevotella buccae | 3 | csx28 | A | NGA |
| Bacteroides pyogenes | 5 | | A | NGA |
| Alistipes sp. ZOR0009 | 6 | | TG | NA(G) |
| Prevotella sp. MA2016 | 7 | | AT | |
| Riemerella anatipestifer | 8 | | A | NGA |
| Riemerella anatipestifer | 8 | csx28 | A | NGA |
| Prevotella aurantiaca | 9 | | G | NAA |
| Prevotella aurantiaca | 9 | csx28 | | |
| Prevotella | 10 | | AG | |
| saccharolytica | | | | |
| Prevotella intermedia | 12 | | AG | |
| Capnocytophaga | 13 | | A | NAA |
| canimorsus | | | | |
| Capnocytophaga | 13 | csx27 | A | NAA |
| canimorsus | | | | |
| Porphyromonas gulae | 14 | | A | NAA |
| Porphyromonas gulae | 14 | csx28 | A | NGA |
| Prevotella sp. P5-125 | 15 | | AT | |
| Flavobacterium | 16 | | TG | |
| branchiophilum | | | | |
| Flavobacterium | 16 | csx27 | TA | |
| branchiophilum | | | | |
| Myroides odoratimimus | 17 | | T | NAA |
| Porphyromonas gingivalis | 19 | | A | NAA |
| Porphyromonas gingivalis | 19 | csx28 | A | |
| Prevotella intermedia | 21 | | A | NGA |
| Prevotella intermedia | 21 | csx28 | A | NGA |

### Example 2: Activity of Cas13b in Mammalian Cells

[0785] HEK293T cells were transfected using the standard lipofectamine 2000 protocol with the following plasmids:

[0786] (a) Cas13b (or control C2c2) mammalian expression plasmid, with a 1× Nuclear Export Sequence tag on the C-term of the gene.

[0787] (b) crRNA expression plasmid, each expressing either a targeting crRNA against Gaussia Luciferase or a non-targeting crRNA.

[0788] (c) Luciferase reporter plasmid, expressing Gaussia and Cypridinia luciferase from two separate promoters.

[0789] Gaussia luciferase was targeted for knockdown, and the level of cypridinia luciferase was used to control for transfection efficiency. Leptotrichia wadeii C2c2 was used for comparison with C2c2 orthologs.

[0790] The following spacer sequences were used in the respective guides:

TABLE 3

| | |
|---|---|
| Cas13b-guide 2 | GGGCATTGGCTTCCATCTCTTTGAGCACCT |
| | (SEQ ID NO: 167 |
| Cas13b-guide NT | GCAGGGTTTTCCCAGTCACGACGTTGTAAA |
| | (SEQ ID NO: 168) |
| Experiment #2 | |
| (14 vs. 15 vs. C2c2) | |
| Cas13b-guide0 | GAAGTCTTCGTTGTTCTCGGTGGGCTTGGC |
| | (SEQ ID NO: 169 |
| Cas13b-guide1 | GGGCATTGGCTTCCATCTCTTTGAGCACCT |
| | (SEQ ID NO: 170) |
| Cas13b-guide2 | GACAGGCAGATCAGACAGCCCCTGGTGCAG |
| | (SEQ ID NO: 171) |
| Cas13b-guide3 | GTAGGTGTGGCAGCGTCCTGGGATGAACTT |
| | (SEQ ID NO: 172) |
| Cas13b-guide4 | GGAATGTCGACGATCGCCTCGCCTATGCCG |
| | (SEQ ID NO: 173) |
| C2c2-guide0 | AGTCTTCGTTGTTCTCGGTGGGCTTGGC |
| | (SEQ ID NO: 174) |
| C2c2-guide1 | GCATTGGCTTCCATCTCTTTGAGCACCT |
| | (SEQ ID NO: 175) |
| C2c2-guide2 | CAGGCAGATCAGACAGCCCCTGGTGCAG |
| | (SEQ ID NO: 176) |
| C2c2-guide3 | AGGTGTGGCAGCGTCCTGGGATGAACTT |
| | (SEQ ID NO: 177) |
| C2c2-guide4 | AATGTCGACGATCGCCTCGCCTATGCCG |
| | (SEQ ID NO: 178) |
| Cas13b-guide NT | GCAGGGTTTTCCCAGTCACGACGTTGTAAA |
| | (SEQ ID NO: 179) |
| C2c2-guide NT | AGGGTTTTCCCAGTCACGACGTTGTAAA |
| | (SEQ ID NO: 180) |

[0791] The results for the different Cas13b orthologs are provided in FIG. 2. The orthologs are classified as Low/No activity, Medium, High, or Gold. “Gold” orthologs provided >80% knockdown of luciferase activity with the majority of guides tested. “High” orthologs provided >50% knockdown of luciferase activity with the majority of guides tested. “Medium” orthologs provided ˜50% knockdown of luciferase activity with the majority of guides tested. “Low/No” orthologs provided <80% knockdown of luciferase activity with all of guides tested.

[0792] FIG. 3 shows normalised comparison data for the activity of several of the orthologs tested, using Guide 2 (GGGCATTGGCTTCCATCTCTTTGAGCACCT) (SEQ ID NO: 181) and a non-targeting guide as control (GCAGGGTTTTCCCAGTCACGACGTTGTAAA) (SEQ ID NO: 182). It can be seen that the Cas13b orthologs nos. 14, 15, 19, and 20 (from Porphyromonas gulae, Prevotella sp. P5-125, Porphyromonas gingivalis, and Porphyromonas sp. COT-0520H4946) are particularly active in mammalian cells.

[0793] FIG. 4 shows normalised data comparing the two most effective orthologs, 14 and 15, with C2c2/Cas13a, using several luciferase-targeting guides and a non-targeting control guide. It can be seen that the Cas13b orthologs nos. 14 and 15 (from Porphyromonas gulae and Prevotella sp. P5-125) are consistently more active than Leptotrichia wadeii C2c2 in mammalian cells.

### Example 3

[0794] Efficient and precise nucleic acid editing holds great promise for treating genetic disease, particularly at the level of RNA, where disease-relevant transcripts can be rescued to yield functional protein products. Type VI CRISPR-Cas systems contain the programmable single-effector RNA-guided RNases Cas13. Here, we profile the diversity of Type VI systems to engineer a Cas13 ortholog capable of robust knockdown and demonstrate RNA editing by using catalytically-inactive Cas13 (dCas13) to direct adenosine deaminase activity to transcripts in mammalian cells. By fusing the ADAR2 deaminase domain to dCas13 and engineering guide RNAs to create an optimal RNA duplex substrate, we achieve targeted editing of specific single adenosines to inosines (which is read out as guanosine during translation) with efficiencies routinely ranging from 20-40% and up to 89%. This system, referred to as RNA Editing for Programmable A to I Replacement (REPAIR), can be further engineered to achieve high specificity. An engineered variant, REPAIRv2, displays greater than 170-fold increase in specificity while maintaining robust on-target A to I editing. We use REPAIRv2 to edit full-length transcripts containing known pathogenic mutations and create functional truncated versions suitable for packaging in adeno-associated viral (AAV) vectors. REPAIR presents a promising RNA editing platform with broad applicability for research, therapeutics, and biotechnology. Precise nucleic acid editing technologies are valuable for studying cellular function and as novel therapeutics. Although current editing tools, such as the Cas9 nuclease, can achieve programmable modification of genomic loci, edits are often heterogenous due to insertions or deletions or require a donor template for precise editing. Base editors, such as dCas9-APOBEC fusions, allow for editing without generating a double stranded break, but may lack precision due to the nature of cytidine deaminase activity, which edits any cytidine in a target window. Furthermore, the requirement for a protospacer adjacent motif (PAM) limits the number of possible editing sites. Here, we describe the development of a precise and flexible RNA base editing tool using the RNA-guided RNA targeting Cas13 enzyme from type VI prokaryotic clustered regularly interspaced short palindromic repeats (CRISPR) adaptive immune system.

[0795] Precise nucleic acid editing technologies are valuable for studying cellular function and as novel therapeutics. Current editing tools, based on programmable nucleases such as the prokaryotic clustered regularly interspaced short palindromic repeats (CRISPR)-associated nucleases Cas9 (1-4) or Cpf1 (5), have been widely adopted for mediating targeted DNA cleavage which in turn drives targeted gene disruption through non-homologous end joining (NHEJ) or precise gene editing through template-dependent homology-directed repair (HDR)(6). NHEJ utilizes host machineries that are active in both dividing and post-mitotic cells and provides efficient gene disruption by generating a mixture of insertion or deletion (indel) mutations that can lead to frame shifts in protein coding genes. HDR, in contrast, is mediated by host machineries whose expression is largely limited to replicating cells. As such, the development of gene-editing capabilities in post-mitotic cells remains a major challenge. Recently, DNA base editors, such as the use of catalytically inactive Cas9 (dCas9) to target cytidine deaminase activity to specific genome targets to effect cytosine to thymine conversions within a target window, allow for editing without generating a DNA double strand break and significantly reduces the formation of indels (7, 8). However the targeting range of DNA base editors is limited due to the requirement of Cas9 for a protospacer adjacent motif (PAM) at the editing site (9). Here, we describe the development of a precise and flexible RNA base editing technology using the type VI CRISPR-associated RNA-guided RNase Cas13(10-13).

[0796] Cas13 enzymes have two Higher Eukaryotes and Prokaryotes Nucleotide-binding (HEPN) endoRNase domains that mediate precise RNA cleavage (10, 11). Three Cas13 protein families have been identified to date: Cas13a (previously known as C2c2), Cas13b, and Cas13c (12, 13). We recently reported Cas13a enzymes can be adapted as tools for nucleic acid detection (14) as well as mammalian and plant cell RNA knockdown and transcript tracking (15). The RNA-guided nature of Cas13 enzymes makes them attractive tool for RNA binding and perturbation applications.

[0797] The adenosine deaminase acting on RNA (ADAR) family of enzymes mediates endogenous editing of transcripts via hydrolytic deamination of adenosine to inosine, a nucleobase that is functionally equivalent to guanosine in translation and splicing (16). There are two functional human ADAR orthologs, ADAR1 and ADAR2, which consist of N-terminal double stranded RNA-binding domains and a C-terminal catalytic deamination domain. Endogenous target sites of ADAR1 and ADAR2 contain substantial double stranded identity, and the catalytic domains require duplexed regions for efficient editing in vitro and in vivo (17, 18). Although ADAR proteins have preferred motifs for editing that could restrict the potential flexibility of targeting, hyperactive mutants, such as ADAR(E488Q) (19), relax sequence constraints and improve adenosine to inosine editing rates. ADARs preferentially deaminate adenosines opposite cytidine bases in RNA duplexes (20), providing a promising opportunity for precise base editing. Although previous approaches have engineered targeted ADAR fusions via RNA guides (21-24), the specificity of these approaches has not been reported and their respective targeting mechanisms rely on RNA-RNA hybridization without the assistance of protein partners that may enhance target recognition and stringency.

[0798] Here we assay the entire family of Cas13 enzymes for RNA knockdown activity in mammalian cells and identify the Cas13b ortholog from Prevotella sp. P5-125 (PspCas13b) as the most efficient and specific for mammalian cell applications. We then fuse the ADAR2 deaminase domain (ADARDD) to catalytically inactive PspCas13b and demonstrate RNA editing for programmable A to I (G) replacement (REPAIR) of reporter and endogenous transcripts as well as disease-relevant mutations. Lastly, we employ a rational mutagenesis scheme to improve the specificity of dCas13b-ADAR2DD fusions to generate REPAIRv2 with more than 170 fold increase in specificity.

### Design and Cloning of Bacterial Constructs

[0799] Mammalian codon optimized Cas13b constructs were cloned into the chloramphenicol resistant pACYC184 vector under control of the Lac promoter. Two corresponding direct-repeat (DR) sequences separated by Bsa1 restriction sites were then inserted downstream of Cas13b, under control of the pJ23119 promoter. Last, oligos for targeting spacers were phosphorylated using T4 PNK (New England Biolabs), annealed and ligated into Bsa1 digested vectors using T7 ligase (Enzymatics) to generate targeting Cas13b vectors.

### Bacterial PFS Screens

[0800] Ampicillin resistance plasmids for PFS screens were cloned by inserting PCR products containing Cas13b targets with 2 5′ randomized nucleotides and 4 3′ randomized nucleotides separated by a target site immediately downstream of the start codon of the ampicillin resistance gene b1a using NEB Gibson Assembly (New England Biolabs). 100 ng of ampicillin-resistant target plasmids were then electroporated with 65-100 ng chloramphenicol-resistant Cas13b bacterial targeting plasmids into Endura Electrocompetent Cells. Plasmids were added to cells, incubated 15 minutes on ice, electroporated using the manufacturer's protocol, and then 950 uL of recovery media was added to cells before a one hour outgrowth at 37C. The outgrowth was plated onto chloramphenicol and ampicillin double selection plates. Serial dilutions of the outgrowth were used to estimate the cfu/ng DNA. 16 hours post plating, cells were scraped off plates and surviving plasmid DNA harvested using the Qiagen Plasmid Plus Maxi Kit (Qiagen). Surviving Cas13b target sequences and their flanking regions were amplified by PCR and sequenced using an Illumina NextSeq. To assess PFS preferences, the positions containing randomized nucleotides in the original library were extracted, and sequences depleted relative to the vector only condition that were present in both bioreplicates were extracted using custom python scripts. The −log 2 of the ratio of PFS abundance in the Cas13b condition compared to the vector only control was then used to calculate preferred motifs. Specifically, all sequences having −log 2(sample/vector) depletion ratios above a specific threshold were used to generate weblogos of sequence motifs (weblogo.berkeley.edu). The specific depletion ratio values used to generate weblogos for each Cas13b ortholog are listed in Table 7.

### Design and Cloning of Mammalian Constructs for RNA Interference

[0801] To generate vectors for testing Cas13 orthologs in mammalian cells, mammalian codon optimized Cas13a, Cas13b, and Cas13c genes were PCR amplified and golden-gate cloned into a mammalian expression vector containing dual NLS sequences and a C-terminal msfGFP, under control of the EF1alpha promoter. For further optimization Cas13 orthologs were golden gate cloned into destination vectors containing different C-terminal localization tags under control of the EF1alpha promoter.

[0802] The dual luciferase reporter was cloned by PCR amplifying Gaussia and Cypridinia luciferase coding DNA, the EF1alpha and CMV promoters and assembly using the NEB Gibson Assembly (New England Biolabs).

[0803] For expression of mammalian guide RNA for Cas13a, Cas13b, or Cas13c orthologs, the corresponding direct repeat sequences were synthesized with golden-gate acceptor sites and cloned under U6 expression via restriction digest cloning. Individual guides were then cloned into the corresponding expression backbones for each ortholog by golden gate cloning.

### Cloning of Pooled Mismatch Libraries for Cas13 Interference Specificity

[0804] Pooled mismatch library target sites were created by PCR. Oligos containing semi-degenerate target sequences in G-luciferase containing a mixture of 94% of the correct base and 2% of each incorrect base at each position within the target were used as one primer, and an oligo corresponding to a non-targeted region of G-luciferase was used as the second primer in the PCR reaction. The mismatch library target was then cloned into the dual luciferase reporter in place of the wildtype G-luciferase using NEB Gibson assembly (New England Biolabs).

### Design and Cloning of Mammalian Constructs for RNA Editing

[0805] PspCas13b was made catalytically inactive (dPspCas13b) via two histidine to alanine mutations (H133A/H1058A) at the catalytic site of the HEPN domains. The deaminase domains of human ADAR1 and ADAR2 were synthesized and PCR amplified for gibson cloning into pcDNA-CMV vector backbones and were fused to dPspCas13b at the C-terminus via GS or GSGGGGS (SEQ ID NO: 183) linkers. For the experiment in which we tested different linkers we cloned the following additional linkers between dPspCas13b and ADAR2dd: GGGGSGGGGSGGGGS (SEQ ID NO: 184), EAAAK (SEQ ID NO: 185), GGSGGSGGSGGSGGSGGS (SEQ ID NO: 186), and SGSETPGTSESATPES (SEQ ID NO: 187) (XTEN). Specificity mutants were generated by gibson cloning the appropriate mutants into the dPspCas13b-GSGGGGS (SEQ ID NO: 188) backbone.

[0806] The luciferase reporter vector for measuring RNA editing activity was generated by creating a W85X mutation (TGG>TAG) in the luciferase reporter vector used for knockdown experiments. This reporter vector expresses functional Gluc as a normalization control, but a defective Cluc due to the addition of a pretermination site. To test ADAR editing motif preferences, we cloned every possible motif around the adenosine at codon 85 (XAX) of Cluc.

[0807] For testing PFS preference of REPAIR, we cloned a pooled plasmid library containing a 6 basepair degenerate PFS sequence upstream of a target region and adenosine editing site. The library was synthesized as an ultramer from Integrated DNA Technologies (IDT) and was made double stranded via annealing a primer and Klenow fragment of DNA polymerase I (New England Biolabs) fill in of the sequence. This dsDNA fragment containing the degenerate sequence was then gibson cloned into the digested reporter vector and this was then isopropanol precipitated and purified. The cloned library was then electroporated into Endura competent E. coli cells (Lucigen) and plated on 245 mm×245 mm square bioassay plates (Nunc). After 16 hours, colonies were harvested and midiprepped using endotoxin-free MACHEREY-NAGEL midiprep kits. Cloned libraries were verified by next generation sequencing.

[0808] For cloning disease-relevant mutations for testing REPAIR activity, 34 G>A mutations related to disease pathogenesis as defined in ClinVar were selected and 200 bp regions surrounding these mutations were golden gate cloned between mScarlett and EGFP under a CMV promoter. Two additional G>A mutations in AVPR2 and FANCC were selected for Gibson cloning the whole gene sequence under expression of EF1alpha.

[0809] For expression of mammalian guide RNA for REPAIR, the PspCas13b direct repeat sequences were synthesized with golden-gate acceptor sites and cloned under U6 expression via restriction digest cloning. Individual guides were then cloned into this expression backbones by golden gate cloning.

### Mammalian Cell Culture

[0810] Mammalian cell culture experiments were performed in the HEK293FT line (American Type Culture Collection (ATCC)), which was grown in Dulbecco's Modified Eagle Medium with high glucose, sodium pyruvate, and GlutaMAX (Thermo Fisher Scientific), additionally supplemented with 1× penicillin—streptomycin (Thermo Fisher Scientific) and 10% fetal bovine serum (VWR Seradigm). Cells were maintained at confluency below 80%.

[0811] Unless otherwise noted, all transfections were performed with Lipofectamine 2000 (Thermo Fisher Scientific) in 96-well plates coated with poly-D-lysine (BD Biocoat). Cells were plated at approximately 20,000 cells/well sixteen hours prior to transfection to ensure 90% confluency at the time of transfection. For each well on the plate, transfection plasmids were combined with Opti-MEM I Reduced Serum Medium (Thermo Fisher) to a total of 25 μl. Separately, 24.5 ul of Opti-MEM was combined with 0.5 ul of Lipofectamine 2000. Plasmid and Lipofectamine solutions were then combined and incubated for 5 minutes, after which they were pipetted onto cells.

### RNA Knockdown Mammalian Cell Assays

[0812] To assess RNA targeting in mammalian cells with reporter constructs, 150 ng of Cas13 construct was co-transfected with 300 ng of guide expression plasmid and 12.5 ng of the knockdown reporter construct. 48 hours post-transfection, media containing secreted luciferase was removed from cells, diluted 1:5 in PBS, and measured for activity with BioLux Cypridinia and Biolux Gaussia luciferase assay kits (New England Biolabs) on a plate reader (Biotek Synergy Neo2) with an injection protocol. All replicates performed are biological replicates.

[0813] For targeting of endogenous genes, 150 ng of Cas13 construct was co-transfected with 300 ng of guide expression plasmid. 48 hours post-transfection, cells were lysed and RNA was harvested and reverse transcribed using a previously described modification of the Cells-to-Ct kit (Thermo Fisher Scientific). cDNA expression was measured via qPCR using TaqMan qPCR probes for the KRAS transcript (Thermo Fisher Scientific), GAPDH control probes (Thermo Fisher Scientific), and Fast Advanced Master Mix (Thermo Fisher Scientific). qPCR reactions were read out on a LightCycler 480 Instrument II (Roche), with four 5 ul technical replicates in 384-well format.

### Evaluation of RNA Specificity Using Pooled Library of Mismatched Targets

[0814] The ability of Cas13 to interfere with the mismatched target library was tested using HEK293FT cells seeded in 6 well plates. ˜70% confluent cells were transfected using 2400 ng Cas13 vector, 4800 ng of guide and 240 ng of mismatched target library. 48 hours post transfection, cells were harvested and RNA extracted using the QIAshredder (Qiagen) and the Qiagen RNeasy Mini Kit. lug of extracted RNA was reverse transcribed using the qScript Flex cDNA synthesis kit (Quantabio) following the manufacturer's gene-specific priming protocol and a Gluc specific RT primer. cDNA was then amplified and sequenced on an Illumina NextSeq.

[0815] The sequencing was analyzed by counting reads per sequence and depletion scores were calculated by determining the log 2(-read count ratio) value, where read count ratio is the ratio of read counts in the targeting guide condition versus the non-targeting guide condition. This score value represents the level of Cas13 activity on the sequence, with higher values representing stronger depletion and thus higher Cas13 cleavage activity. Separate distributions for the single mismatch and double mismatch sequences were determined and plotted as heatmaps with a depletion score for each mismatch identity. For double mismatch sequences the average of all possible double mismatches at a given position were plotted.

### Transcriptome-Wide Profiling of Cas13 in Mammalian Cells by RNA Sequencing

[0816] For measurement of transcriptome-wide specificity, 150 ng of Cas13 construct, 300 ng of guide expression plasmid and 15 ng of the knockdown reporter construct were co-transfected; for shRNA conditions, 300 ng of shRNA targeting plasmid, 15 ng of the knockdown reporter construct, and 150 ng of EF1-alpha driven mCherry (to balance reporter load) were co-transfected. 48 hours after transfection, RNA was purified with the RNeasy Plus Mini kit (Qiagen), mRNA was selected for using NEBNext Poly(A) mRNA Magnetic Isolation Module (New England Biolabs) and prepared for sequencing with the NEBNext Ultra RNA Library Prep Kit for Illumina (New England Biolabs). RNA sequencing libraries were then sequenced on a NextSeq (Illumina).

[0817] To analyze transcriptome-wide sequencing data, reads were aligned RefSeq GRCh38 assembly using Bowtie and RSEM version 1.2.31 with default parameters. Transcript expression was quantified as log 2(TPM+1), genes were filtered for log 2(TPM+1) >2.5 For selection of differentially expressed genes, only genes with differential changes of >2 or <0.75 were considered. Statistical significance of differential expression was evaluated Student's T-test on three targeting replicates versus non-targeting replicates, and filtered for a false discovery rate of <0.01% by Benjamini-Hochberg procedure.

### ADAR RNA Editing in Mammalian Cells Transfections

[0818] To assess REPAIR activity in mammalian cells, we transfected 150 ng of REPAIR vector, 300 ng of guide expression plasmid, and 40 ng of the RNA editing reporter. After 48 hours, RNA from cells were harvested and reverse transcribed using a method previously described with a gene specific reverse transcription primer. The extracted cDNA was then subjected to two rounds of PCR to add Illumina adaptors and sample barcodes using NEBNext High-Fidelity 2×PCR Master Mix. The library was then subjected to next generation sequencing on an Illumina NextSeq or MiSeq. RNA editing rates were then evaluated at all adenosine within the sequencing window.

[0819] In experiments where the luciferase reporter was targeted for RNA editing, we also harvested the media with secreted luciferase prior to RNA harvest. In this case, because the corrected Cluc might be at low levels, we did not dilute the media. We measured luciferase activity with BioLux Cypridinia and Biolux Gaussia luciferase assay kits (New England Biolabs) on a plate reader (Biotek Synergy Neo2) with an injection protocol. All replicates performed are biological replicates.

### PFS Binding Mammalian Screen

[0820] To determine the contribution of the PFS to editing efficiency, 625 ng of PFS target library, 4.7 ug of guide, and 2.35 ug of REPAIR were co-transfected on HEK293FT cells plated in 225 cm2 flasks. Plasmids were mixed with 33 ul of PLUS reagent (Thermo Fisher Scientific), brought to 533 ul with Opti-MEM, incubated for 5 minutes, combined with 30 ul of Lipofectamine 2000 and 500 ul of Opti-MEM, incubated for an additional 5 minutes, and then pipetted onto cells. 48 hours post-transfection, RNA was harvested with the RNeasy Plus Mini kit (Qiagen), reverse transcribed with qScript Flex (Quantabio) using a gene specific primer, and amplified with two rounds of PCR using NEBNext High-Fidelity 2×PCR Master Mix (New England Biolabs) to add Illumina adaptors and sample barcodes. The library was sequenced on an Illumina NextSeq, and RNA editing rates at the target adenosine were mapped to PFS identity. To increase coverage, the PFS was computationally collapsed to 4 nucleotides. REPAIR editing rates were calculated for each PFS, averaged over biological replicates with non-targeting rates for the corresponding PFS subtracted.

### Whole-Transcriptome Sequencing to Evaluate ADAR Editing Specificity

[0821] For analyzing off-target RNA editing sites across the transcriptome, we harvested total RNA from cells 48 hours post transfection using the RNeasy Plus Miniprep kit (Qiagen). The mRNA fraction is then enriched using a NEBNext Poly(A) mRNA Magnetic Isolation Module (NEB) and this RNA is then prepared for sequencing using NEBNext Ultra RNA Library Prep Kit for Illumina (NEB). The libraries were then sequenced on an Illumina NextSeq and loaded such that there was at least 5 million reads per sample.

### RNA Editing Analysis for Targeted and Transcriptome Wide Experiments

[0822] To analyze the transcriptome-wide RNA editing RNA sequencing data, sequence files were randomly downsampled to 5 million reads. An index was generated using the RefSeq GRCh38 assembly with Gluc and Cluc sequences added and reads were aligned and quantified using Bowtie/RSEM version 1.3.0. Alignment BAMs were then sorted and analyzed for RNA editing sites using REDitools [cite] with the following parameters: -t 8-e-d-1-U [AG or TC]-p-u-m20-T6-0-W-v 1-n 0.0. Any significant edits found in untransfected or EGFP-transfected conditions were considered to be SNPs or artifacts of the transfection and filtered out from the analysis of off-targets. Off-targets were considered significant if the Fisher's exact test yielded a p-value less than 0.5 and that at least 2 of 3 biological replicates identified the edit site.

[0823] For analyzing the predicted variant effects of each off-target, the list of off-target edit sites was analyzed using the variant annotation integrator (https://genome.ucsc.edu/cgi-bin/hgVai) as part of the UCSC genome browser suite of tools using the SIFT and PolyPhen-2 annotations. To declare whether the off-target genes are oncogenic, a database of oncogenic annotations from the COSMIC catalogue of somatic mutations in cancer (cancer. Sanger. ac.uk).

[0824] For analyzing whether the REPAIR constructs perturbed RNA levels, the transcript per million (TPM) values output from the RSEM analysis were used for expression counts and transformed to log-space by taking the log 2(TPM+1). To find differentially regulated genes, a Student's t-test was performed on three targeting guide replicates versus three non-targeting guide replicates. The statistical analysis was only performed on genes with log 2(TPM+1) values greater than 2.5 and genes were only considered differentially regulated if they had a fold change greater than 2 or less than 0.8. Genes were reported if they had a false discovery rate of less than 0.01.

### Comprehensive Characterization of Cas13 Family Members in Mammalian Cells

[0825] We previously developed LwaCas13a for mammalian knockdown applications, but it required an msfGFP stabilization domain for efficient knockdown and, although the specificity was high, knockdown efficiencies were not consistently below 50%(15). We sought to identify a more robust RNA-targeting CRISPR system by characterizing a genetically diverse set of Cas13 family members to assess their RNA knockdown activity in mammalian cells (FIG. 5A). We cloned 21 Cas13a, 15 Cas13b, and 7 Cas13c mammalian codon-optimized orthologs (Table 4) into an expression vector with N- and C-terminal nuclear export signal (NES) sequences and a C-terminal msfGFP to enhance protein stability. To assay interference in mammalian cells, we designed a dual reporter construct expressing the orthogonal Gaussia (Gluc) and Cypridinia (Cluc) luciferases under separate promoters, which allows one luciferase to function as a measure of Cas13 interference activity and the other to serve as an internal control. For each ortholog, we designed PFS-compatible guide RNAs, using the Cas13b PFS motifs derived from an ampicillin interference assay (FIG. 11; Table 5) and the 3′ H PFS from previous reports of Cas13a activity (10).

[0826] We transfected HEK293FT cells with Cas13 expression, guide RNA and reporter plasmids and quantified levels of the targeted Gluc 48 hours later. Testing two guide RNAs for each Cas13 ortholog revealed a range of activity levels, including five Cas13b orthologs with similar or increased interference across both guide RNAs relative to the recently characterized LwaCas13a (FIG. 5B). We selected these five Cas13b orthologs, as well as the top two Cas13a orthologs for further engineering.

[0827] We next tested for Cas13-mediated knockdown of Gluc without msfGFP, in order to select orthologs that do not require stabilization domains for robust activity. We hypothesized that, in addition to msfGFP, Cas13 activity could be affected by subcellular localization, as previously reported for optimization of LwaCas13a (15). Therefore, we tested the interference activity of the seven selected Cas13 orthologs C-terminally fused to one of six different localization tags without msfGFP. Using the luciferase reporter assay, we found that PspCas13b and PguCas13b C-terminally fused to the HIV Rev gene NES and RanCas13b C-terminally fused to the MAPK NES had the highest levels of interference activity (FIG. 12A). To further distinguish activity levels of the top orthologs, we compared the three optimized Cas13b constructs to the optimal LwaCas13a-msfGFP fusion and shRNA for their ability to knockdown the KRAS transcript using position-matched guides (FIG. 12B). We observed the highest levels interference for PspCas13b (average knockdown 62.9%) and thus selected this for further comparison to LwaCas13a.

[0828] To more rigorously define the activity level of PspCas13b and LwaCas13a we designed position matched guides tiling along both Gluc and Cluc and assayed their activity using our luciferase reporter assay. We tested 93 and 20 position matched guides targeting Gluc and Cluc, respectively, and found that PspCas13b had consistently increased levels of knockdown relative to LwaCas13a (average of 92.3% for PspCas13b vs. 40.1% knockdown for LwaCas13a) (FIG. 5C,D).

### Specificity of Cas13 Mammalian Interference Activity

[0829] To characterize the interference specificities of PspCas13b and LwaCas13a we designed a plasmid library of luciferase targets containing single mismatches and double mismatches throughout the target sequence and the three flanking 5′ and 3′ base pairs (FIG. 12C). We transfected HEK293FT cells with either LwaCas13a or PspCas13b, a fixed guide RNA targeting the unmodified target sequence, and the mismatched target library corresponding to the appropriate system. We then performed targeted RNA sequencing of uncleaved transcripts to quantify depletion of mismatched target sequences. We found that LwaCas13a and PspCas13b had a central region that was relatively intolerant to single mismatches, extending from base pairs 12-26 for the PspCas13b target and 13-24 for the LwaCas13a target (FIG. 12D). Double mismatches were even less tolerated than single mutations, with little knockdown activity observed over a larger window, extending from base pairs 12-29 for PspCas13b and 8-27 for LwaCas13a in their respective targets (FIG. 12E). Additionally, because there are mismatches included in the three nucleotides flanking the 5′ and 3′ ends of the target sequence, we could assess PFS constraints on Cas13 knockdown activity. Sequencing showed that almost all PFS combinations allowed robust knockdown, indicating that a PFS constraint for interference in mammalian cells likely does not exist for either enzyme tested. These results indicate that Cas13a and Cas13b display similar sequence constraints and sensitivities against mismatches.

[0830] We next characterized the interference specificity of PspCas13b and LwaCas13a across the mRNA fraction of the transcriptome. We performed transcriptome-wide mRNA sequencing to detect significant differentially expressed genes. LwaCas13a and PspCas13b demonstrated robust knockdown of Gluc (FIG. 5E,F) and were highly specific compared to a position-matched shRNA, which showed hundreds of off-targets (FIG. 5G).

### Cas13-ADAR Fusions Enable Targeted RNA Editing

[0831] Given that PspCas13b achieved consistent, robust, and specific knockdown of mRNA in mammalian cells, we envisioned that it could be adapted as an RNA binding platform to recruit the deaminase domain of ADARs (ADARDD) for programmable RNA editing. To engineer a PspCas13b lacking nuclease activity (dPspCas13b, referred to as dCas13b from here), we mutated conserved catalytic residues in the HEPN domains and observed loss of luciferase RNA knockdown activity (FIG. 13A). We hypothesized that a dCas13b-ADAR_{DD} fusion could be recruited by a guide RNA to target adenosines, with the hybridized RNA creating the required duplex substrate for ADAR activity (FIG. 6A). To enhance target adenosine deamination rates we introduced two additional modifications to our initial RNA editing design: we introduced a mismatched cytidine opposite the target adenosine, which has been previously reported to increase deamination frequency, and fused dCas13b with the deaminase domains of human ADAR1 or ADAR2 containing hyperactivating mutations to enhance catalytic activity (ADAR1_{DD}(E1008Q)(25) or ADAR2_{DD}(E488Q)(/9)).

[0832] To test the activity of dCas13b-ADARDD we generated an RNA-editing reporter on Cluc by introducing a nonsense mutation (W85X (UGG->UAG)), which could functionally be repaired to the wildtype codon through A->I editing (FIG. 6B) and then be detected as restoration of Cluc luminescence. We evenly tiled guides with spacers 30, 50, 70 or 84 nucleotides in length across the target adenosine to determine the optimal guide placement and design (FIG. 6C). We found that dCas13b-ADAR1DD required longer guides to repair the Cluc reporter, while dCas13b-ADAR2DD was functional with all guide lengths tested (FIG. 6C). We also found that the hyperactive E488Q mutation improved editing efficiency, as luciferase restoration with the wildtype ADAR2_{DD} was reduced (FIG. 13B). From this demonstration of activity, we chose dCas13b-ADAR2_{DD}(E488Q) for further characterization and designated this approach as RNA Editing for Programmable A to I Replacement version 1 (REPAIRv1).

[0833] To validate that restoration of luciferase activity was due to bona fide editing events, we measured editing of Cluc transcripts subject to REPAIRv1 directly via reverse transcription and targeted next-generation sequencing. We tested 30- and 50-nt spacers around the target site and found that both guide lengths resulted in the expected A to I edit, with 50-nt spacers achieving higher editing percentages (FIG. 6D,E, FIG. 13C). We also observed that 50-nt spacers had an increased propensity for editing at non-targeted adenosines, likely due to increased regions of duplex RNA (FIG. 6E, FIG. 13C).

[0834] We next targeted an endogenous gene, PPIB. We designed 50-nt spacers tiling PPIB and found that we could edit the PPIB transcript with up to 28% editing efficiency (FIG. 13D). To test if REPAIR could be further optimized, we modified the linker between dCas13b and ADAR2_{DD}(E488Q) (FIG. 13E, Table 6) and found that linker choice modestly affected luciferase activity restoration.

### Defining the Sequence Parameters for RNA Editing

[0835] Given that we could achieve precise RNA editing at a test site, we wanted to characterize the sequence constraints for programming the system against any RNA target in the transcriptome. Sequence constraints could arise from dCas13b targeting limitations, such as the PFS, or from ADAR sequence preferences (26). To investigate PFS constraints on REPAIRv1, we designed a plasmid library carrying a series of four randomized nucleotides at the 5′ end of a target site on the Cluc transcript (FIG. 7A). We targeted the center adenosine within either a UAG or AAC motif and found that for both motifs, all PFSs demonstrated detectable levels of RNA editing, with a majority of the PFSs having greater than 50% editing at the target site (FIG. 7B). Next, we sought to determine if the ADAR2_{DD} in REPAIRv1 had any sequence constraints immediately flanking the targeted base, as has been reported previously for ADAR2_{DD} (26). We tested every possible combination of 5′ and 3′ flanking nucleotides directly surrounding the target adenosine (FIG. 7C), and found that REPAIRv1 was capable of editing all motifs (FIG. 7D). Lastly, we analyzed whether the identity of the base opposite the target A in the spacer sequence affected editing efficiency and found that an A-C mismatch had the highest luciferase restoration with A-G, A-U, and A-A having drastically reduced REPAIRv1 activity (FIG. 13F).

### Correction of Disease-Relevant Human Mutations Using REPAIRv1

[0836] To demonstrate the broad applicability of the REPAIRv1 system for RNA editing in mammalian cells, we designed REPAIRv1 guides against two disease relevant mutations: 878G>A (AVPR2 W293X) in X-linked Nephrogenic diabetes insipidus and 1517G>A (FANCC W506X) in Fanconi anemia. We transfected expression constructs for cDNA of genes carrying these mutations into HEK293FT cells and tested whether REPAIRv1 could correct the mutations. Using guide RNAs containing 50-nt spacers, we were able to achieve 35% correction of AVPR2 and 23% correction of FANCC (FIG. 8A-D). We then tested the ability of REPAIRv1 to correct 34 different disease-relevant G>A mutations (Table 7) and found that we were able to achieve significant editing at 33 sites with up to 28% editing efficiency (FIG. 8E). The mutations we chose are only a fraction of the pathogenic G to A mutations (5,739) in the ClinVar database, which also includes an additional 11,943 G to A variants (FIG. 8F and FIG. 14). Because there are no sequence constraints, REPAIRv1 is capable of potentially editing all these disease relevant mutations, especially given that we observed significant editing regardless of the target motif (FIG. 7C and FIG. 8G).

[0837] Delivering the REPAIRv1 system to diseased cells is a prerequisite for therapeutic use, and we therefore sought to design REPAIRv1 constructs that could be packaged into therapeutically relevant viral vectors, such as adeno-associated viral (AAV) vectors. AAV vectors have a packaging limit of 4.7 kb, which cannot accommodate the large size of dCas13b-ADARDD (4473 bp) along with promoter and expression regulatory elements. To reduce the size, we tested a variety of N-terminal and C-terminal truncations of dCas13 fused to ADAR2_{DD}(E488Q) for RNA editing activity. We found that all C-terminal truncations tested were still functional and able to restore luciferase signal (FIG. 15), and the largest truncation, C-terminal 4984-1090 (total size of the fusion protein 4,152 bp) was small enough to fit within the packaging limit of AAV vectors.

### Transcriptome-Wide Specificity of REPAIRv1

[0838] Although RNA knockdown with PspCas13b was highly specific, in our luciferase tiling experiments, we observed off-target adenosine editing within the guide:target duplex (FIG. 6E). To see if this was a widespread phenomenon, we tiled an endogenous transcript, KRAS, and measured the degree of off-target editing near the target adenosine (FIG. 9A). We found that for KRAS, while the on-target editing rate was 23%, there were many sites around the target site that also had detectable A to G edits (FIG. 9B).

[0839] Because of the observed off-target editing within the guide:target duplex, we evaluated all possible transcriptome off-targets by performing RNA sequencing on all mRNAs. RNA sequencing revealed that there was a significant number A to G off-target events, with 1,732 off-targets in the targeting condition and 925 off-targets in the non-targeting condition, with 828 off-targets overlapping (FIG. 9C,D). Of all the editing sites across the transcriptome, the on-target editing site had the highest editing rate, with 89% A to G conversion.

[0840] Given the high specificity of Cas13 targeting, we reasoned that the off-targets may arise from ADAR. Two RNA-guided ADAR systems have been described previously (FIG. 16A). The first utilizes a fusion of ADAR2DD to the small viral protein lambda N (λN), which binds to the BoxB-λ RNA hairpin (22). A guide RNA with double BoxB-λ hairpins guides ADAR2DD to edit sites encoded in the guide RNA (23). The second design utilizes full length ADAR2 (ADAR2) and a guide RNA with a hairpin that the double strand RNA binding domains (dsRBDs) of ADAR2 recognize (21, 24). We analyzed the editing efficiency of these two systems compared to REPAIRv1 and found that the BoxB-ADAR2 and ADAR2 systems demonstrated 63% and 36% editing rates, respectively, compared to the 89% editing rate achieved by REPAIRv1 (FIG. 16B-E). Additionally, the BoxB and ADAR2 systems created 2018 and 174 observed off targets, respectively, in the targeting guide conditions, compared to the 1,229 off targets in the REPAIRv1 targeting guide condition. Notably, all the conditions with the two ADAR2DD-based systems (REPAIRv1 and BoxB) showed a high percentage of overlap in their off-targets while the ADAR2 system had a largely distinct set of off-targets (FIG. 16F). The overlap in off-targets between the targeting and non-targeting conditions and between REPAIRv1 and BoxB conditions suggest ADAR2_{DD} drove off-targets independent of dCas13 targeting (FIG. 16F).

### Improving Specificity of REPAIRv1 Through Rational Protein Engineering

[0841] To improve the specificity of REPAIR, we employed structure-guided protein engineering of ADAR2_{DD}(E488Q). Because of the guide-independent nature of off-targets, we hypothesized that destabilizing ADAR2_{DD}(E488Q)-RNA binding would selectively decrease off-target editing, but maintain on-target editing due to increased local concentration from dCas13b tethering of ADAR2_{DD}(E488Q) to the target site. We mutagenized ADAR2_{DD}(E488Q) residues previously determined to contact the duplex region of the target RNA (FIG. 10A) (18) on the ADAR2_{DD}(E488Q) background. To assess efficiency and specificity, we tested 17 single mutants with both targeting and non-targeting guides, under the assumption that background luciferase restoration in the non-targeting condition detected would be indicative of broader off-target activity. We found that mutations at the selected residues had significant effects on the luciferase activity for targeting and non-targeting guides (FIG. 10A,B, FIG. 17A). A majority of mutants either significantly improved the luciferase activity for the targeting guide or increased the ratio of targeting to non-targeting guide activity, which we termed the specificity score (FIG. 10A,B). We selected a subset of these mutants (FIG. 10B) for transcriptome-wide specificity profiling by next generation sequencing. As expected, off-targets measured from transcriptome-wide sequencing correlated with our specificity score (FIG. 17B) for mutants. We found that with the exception of ADAR2_{DD}(E488Q/R455E), all sequenced REPAIRv1 mutants could effectively edit the reporter transcript (FIG. 10C), with many mutants showing reduction in the number of off-targets (FIGS. 17C and 18). We further explored the surrounding motifs of off-targets for specificity mutants, and found that REPAIRv1 and most of the engineered mutants exhibited a strong 3′ G preference for their edits, in agreement with the characterized ADAR2 motif (FIG. 19A) (26). We selected the mutant ADAR2_{DD}(E488Q/T375G) for future experiments, as it had the highest percent editing of the four mutants with the lowest numbers of transcriptome-wide off targets and termed it REPAIRv2. Compared to REPAIRv1, REPAIRv2 exhibited increased specificity, with a reduction from 1732 to 10 transcriptome off-targets (FIG. 10D). In the region surrounding the targeted adenosine in Cluc, REPAIRv2 had reduced off-target editing, visible in sequencing traces (FIG. 10E). In motifs derived from next-generation sequencing, REPAIRv1 presented a strong preference towards 3′ G, but showed off-targeting edits for all motifs (FIG. 19B); by contrast, REPAIRv2 only edited the strongest off-target motifs (FIG. 19C). The distribution of edits on transcripts was heavily skewed, with highly-edited genes having over 60 edits (FIG. 20A,B), whereas REPAIRv2 only edited one transcript (EEF1A1) multiple times (FIG. 20D-F). REPAIRv1 off-target edits were predicted to result in numerous variants, including 1000 missense mutations (FIG. 20C) with 93 oncogenic events (FIG. 20D). In contrast, REPAIRv2 only had 6 missense mutations (FIG. 20E), none of which had oncogenic consequences (FIG. 20F). This reduction in predicted off-target effects distinguishes REPAIRv2 from other RNA editing approaches.

[0842] We targeted REPAIRv2 to endogenous genes to test if the specificity-enhancing mutations reduced nearby edits in target transcripts while maintaining high-efficiency on-target editing. For guides targeting either KRAS or PPIB, we found that REPAIRv2 had no detectable off-target edits, unlike REPAIRv1, and could effectively edit the on-target adenosine at 27.1% and 13%, respectively (FIG. 10F,G). This specificity extended to additional target sites, including regions that demonstrate high-levels of background in non-targeting conditions for REPAIRv1, such as other KRAS or PPIB target sites (FIG. 21). Overall, REPAIRv2 eliminated off-targets in duplexed regions around the edited adenosine and showed dramatically enhanced transcriptome-wide specificity.

### CONCLUSION

[0843] We have shown here that the RNA-guided RNA-targeting type VI-B effector Cas13b is capable of highly efficient and specific RNA knockdown, providing the basis for improved tools for interrogating essential genes and non-coding RNA as well as controlling cellular processes at the transcriptomic level. Catalytically inactive Cas13b (dCas13b) retains programmable RNA binding capability, which we leveraged here by fusing dCas13b to the adenosine deaminase ADAR2 to achieve precise A to I edits, a system we term REPAIRv1 (RNA Editing for Programmable A to I Replacement version 1). Further engineering of the system produced REPAIRv2, a method with comparable or increased activity relative to current editing platforms with dramatically improved specificity.

[0844] Although Cas13b exhibits high fidelity, our initial results with dCas13b-ADAR2_{DD} fusions revealed thousands of off-targets. To address this, we employed a rational mutagenesis strategy to vary the ADAR2_{DD} residues that contact the RNA duplex, identifying a variant, ADAR2_{DD}(E488Q/T375G), capable of precise, efficient, and highly specific editing when fused to dCas13b. Editing efficiency with this variant was comparable to or better than that achieved with two currently available systems, BoxB-ADAR_{DD} or ADAR2 editing. Moreover, the REPAIRv2 system created only 10 observable off-targets in the whole transcriptome, at least an order of magnitude better than both alternative editing technologies.

[0845] The REPAIR system offers many advantages compared to other nucleic acid editing tools. First, the exact target site can be encoded in the guide by placing a cytidine within the guide extension across from the desired adenosine to create a favorable A-C mismatch ideal for ADAR editing activity. Second, Cas13 has no targeting sequence constraints, such as a PFS or PAM, and no motif preference surrounding the target adenosine, allowing any adenosine in the transcriptome to be potentially targeted with the REPAIR system. We do note, however, that DNA base editors can target either the sense or anti-sense strand, while the REPAIR system is limited to transcribed sequences, thereby constraining the total number of possible editing sites we could target. However, due to the more flexible nature of targeting with REPAIR, this system can effect more edits within ClinVar (FIG. 8C) than Cas9-DNA base editors. Third, the REPAIR system directly deaminates target adenosines to inosines and does not rely on endogenous repair pathways, such as base-excision or mismatch repair, to generate desired editing outcomes. Thus, REPAIR should be possible in non-dividing cells that cannot support other forms of editing. Fourth, RNA editing can be transient, allowing the potential for temporal control over editing outcomes. This property will likely be useful for treating diseases caused by temporary changes in cell state, such as local inflammation.

[0846] The REPAIR system provides multiple opportunities for additional engineering. Cas13b possesses pre-crRNA processing activity (13), allowing for multiplex editing of multiple variants, which alone might not alter disease risk, but together might have additive effects and disease-modifying potential. Extension of our rational design approach, such as combining promising mutations, could further increase the specificity and efficiency of the system, while unbiased screening approaches could identify additional residues for improving REPAIR activity and specificity.

[0847] Currently, the base conversions achievable by REPAIR are limited to generating inosine from adenosine; additional fusions of dCas13 with other catalytic RNA editing domains, such as APOBEC, could enable cytidine to uridine editing. Additionally, mutagenesis of ADAR could relax the substrate preference to target cytidine, allowing for the enhanced specificity conferred by the duplexed RNA substrate requirement to be exploited by C->U editors. Adenosine to inosine editing on DNA substrates may also be possible with catalytically inactive DNA-targeting CRISPR effectors, such as dCas9 or dCpf1, either through formation of DNA-RNA heteroduplex targets (27) or mutagenesis of the ADAR domain.

[0848] REPAIR could be applied towards a range of therapeutic indications where A to I (A to G) editing can reverse or slow disease progression (FIG. 22). First, expression of REPAIR for targeting causal, Mendelian G to A mutations in disease-relevant tissues could be used to revert deleterious mutations and treat disease. For example, stable REPAIR expression via AAV in brain tissue could be used to correct the GRIN2A missense mutation c.2191G>A (Asp731Asn) that causes focal epilepsy (28) or the APP missense mutation c.2149G>A (Val1717Ile) causing early-onset Alzheimer's disease (29). Second, REPAIR could be used to treat disease by modifying the function of proteins involved in disease-related signal transduction. For instance, REPAIR editing would allow the re-coding of some serine, threonine and tyrosine residues that are the targets of kinases (FIG. 22). Phosphorylation of these residues in disease-relevant proteins affects disease progression for many disorders including Alzheimer's disease and multiple neurodegenerative conditions (30). Third, REPAIR could be used to change the sequence of expressed, risk-modifying G to A variants to pre-emptively decrease the chance of entering a disease state for patients. The most intriguing case are the ‘protective’ risk-modifying alleles, which dramatically decrease the chance of entering a disease state, and in some cases, confer additional health benefits. For instance, REPAIR could be used to functionally mimic A to G alleles of PCSK9 and IFIH1 that protect against cardiovascular disease and psoriatic arthritis (31), respectively. Last, REPAIR can be used to therapeutically modify splice acceptor and donor sites for exon modulation therapies. REPAIR can change AU to IU or AA to AI, the functional equivalent of the consensus 5′ splice donor or 3′ splice acceptor sites respectively, creating new splice junctions. Additionally, REPAIR editing can mutate the consensus 3′ splice acceptor site from AG->IG to promote skipping of the adjacent downstream exon, a therapeutic strategy that has received significant interest for the treatment of DMD. Modulation of splice sites could have broad applications in diseases where anti-sense oligos have had some success, such as for modulation of SMN2 splicing for treatment of spinal muscular atrophy (32).

[0849] We have demonstrated the use of the PspCas13b enzyme as both an RNA knockdown and RNA editing tool. The dCas13b platform for programmable RNA binding has many applications, including live transcript imaging, splicing modification, targeted localization of transcripts, pull down of RNA-binding proteins, and epitranscriptomic modifications. Here, we used dCas13 to create REPAIR, adding to the existing suite of nucleic acid editing technologies. REPAIR provides a new approach for treating genetic disease or mimicking protective alleles, and establishes RNA editing as a useful tool for modifying genetic function.

TABLE 4
Cas13 Orthologs used in this study

| | Cas13 | | |
|---|---|---|---|
| Cas13 ID | abbreviation | Host Organism | Protein Accession |
| Cas13a1 | LshCas13a | Leptotrichia shahii | WP_018451595.1 |
| Cas13a2 | LwaCas13a | Leptotrichia wadei (Lw2) | WP_021746774.1 |
| Cas13a3 | LseCas13a | Listeria seeligeri | WP_012985477.1 |
| Cas13a4 | LbmCas13a | Lachnospiraceae bacterium | WP_044921188.1 |
| | | MA2020 | |
| Cas13a5 | LbnCas13a | Lachnospiraceae bacterium | WP_022785443.1 |
| | | NK4A179 | |
| Cas13a6 | CamCas13a | [Clostridium] aminophilum DSM | WP_031473346.1 |
| | | 10710 | |
| Cas13a7 | CgaCas13a | Carnobacterium gallinarum DSM | WP_034560163.1 |
| | | 4847 | |
| Cas13a8 | Cga2Cas13a | Carnobacterium gallinarum DSM | WP_034563842.1 |
| | | 4847 | |
| Cas13a9 | Pprcas13a | Paludibacter propionicigenes | WP_013443710.1 |
| | | WB4 | |
| Cas13a10 | LweCas13a | Listeria weihenstephanensis FSL | WP_036059185.1 |
| | | R9-0317 | |
| Cas13a11 | LbfCas13a | Listeriaceae bacterium FSL M6- | WP_036091002.1 |
| | | 0635 | |
| Cas13a12 | Lwa2Cas13a | Leptotrichia wadei F0279 | WP_021746774.1 |
| Cas13a13 | RcsCas13a | Rhodobacter capsulatus SB 1003 | WP_013067728.1 |
| Cas13a14 | RcrCas13a | Rhodobacter capsulatus R121 | WP_023911507.1 |
| Cas13a15 | RcdCas13a | Rhodobacter capsulatus DE442 | WP_023911507.1 |
| Cas13a16 | LbuCas13a | Leptotrichia buccalis C-1013-b | WP_015770004.1 |
| Cas13a17 | HheCas13a | Herbinix hemicellulosilytica | CRZ35554.1 |
| Cas13a18 | EreCas13a | [Eubacterium] rectale | WP_055061018.1 |
| Cas13a19 | EbaCas13a | Eubacteriaceae bacterium | WP_090127496.1 |
| | | CHKCI004 | |
| Cas13a20 | BmaCas13a | Blautia sp. Marseille-P2398 | WP_062808098.1 |
| Cas13a21 | LspCas13a | Leptotrichia sp. oral taxon 879 | WP_021744063.1 |
| | | str. F0557 | |
| Cas13b1 | BzoCas13b | Bergeyella zoohelcum | WP_002664492 |
| Cas13b2 | PinCas13b | Prevotella intermedia | WP_036860899 |
| Cas13b3 | PbuCas13b | Prevotella buccae | WP_004343973 |
| Cas13b4 | AspCas13b | Alistipes sp. ZOR0009 | WP_047447901 |
| Cas13b5 | PsmCas13b | Prevotella sp. MA2016 | WP_036929175 |
| Cas13b6 | RanCas13b | Riemerella anatipestifer | WP_004919755 |
| Cas13b7 | PauCas13b | Prevotella aurantiaca | WP_025000926 |
| Cas13b8 | PsaCas13b | Prevotella saccharolytica | WP_051522484 |
| Cas13b9 | Pin2Cas13b | Prevotella intermedia | WP_061868553 |
| Cas13b10 | CcaCas13b | Capnocytophaga canimorsus | WP_013997271 |
| Cas13b11 | PguCas13b | Porphyromonas gulae | WP_039434803 |
| Cas13b12 | PspCas13b | Prevotella sp. P5-125 | WP_044065294 |
| Cas13b13 | FbrCas13b | Flavobacterium branchiophilum | WP_014084666 |
| Cas13b14 | PgiCas13b | Porphyromonas gingivalis | WP_053444417 |
| Cas13b15 | Pin3Cas13b | Prevotella intermedia | WP_050955369 |
| Cas13c1 | FnsCas13c | Fusobacterium necrophorum | WP_005959231.1 |
| | | subsp. funduliforme ATCC | |
| | | 51357 contig00003 | |
| Cas13c2 | FndCas13c | Fusobacterium necrophorum DJ- | WP_035906563.1 |
| | | 2 contig0065, whole genome | |
| | | shotgun sequence | |
| Cas13c3 | FnbCas13c | Fusobacterium necrophorum | WP_035935671.1 |
| | | BFTR-1 contig0068 | |
| Cas13c4 | FnfCas13c | Fusobacterium necrophorum | EHO19081.1 |
| | | subsp. funduliforme 1_1_36S | |
| | | cont1.14 | |
| Cas13c5 | FpeCas13c | Fusobacterium perfoetens ATCC | WP_027128616.1 |
| | | 29250 | |
| | | T364DRAFT_scaffold00009.9_C | |
| Cas13c6 | FulCas13c | Fusobacterium ulcerans ATCC | WP_040490876.1 |
| | | 49185 cont2.38 | |
| Cas13c7 | AspCas13c | Anaerosalibacter sp. ND1 | WP_042678931.1 |
| | | genome assembly | |
| | | Anaerosalibacter massiliensis | |
| | | ND1 | |

TABLE 5
PFS cutoffs in bacterial screens

| | | −Log₂ depletion score used to |
|---|---|---|
| Cas13b ortholog | Key | generate PFS motif |
| Bergeyella zoohelcum | 1 | 2 |
| Prevotella intermedia locus 1 | 2 | 1 |
| Prevotella buccae | 3 | 3 |
| Alistipes sp. ZOR0009 | 4 | 1 |
| Prevotella sp. MA2016 | 5 | 2 |
| Riemerella anatipestifer | 6 | 4 |
| Prevotella aurantiaca | 7 | 1 |
| Prevotella saccharolytica | 8 | 0 |
| Prevotella intermedia locus 2 | 9 | 0 |
| Capnocytophaga canimorsus | 10 | 3 |
| Porphyromonas gulae | 11 | 4 |
| Prevotella sp. P5-125 | 12 | 2.1 |
| Flavobacterium | 13 | 1 |
| branchiophilum | | |
| Porphyromonas gingivalis | 14 | 3 |
| Prevotella intermedia locus 2 | 15 | 4 |

TABLE 6
dCas13b-ADAR linker sequences used in this
study for RNA editing in mammalian cells.

| Figure | linker |
|---|---|
| 6C | GSGGGGS (SEQ ID NO: 189) |
| 6E | GS |
| 13B | GSGGGGS (SEQ ID NO: 190) |
| 13C | GS |
| 13D | GS |
| 13E: GS | GS |
| 13E: GSGGGGS | GSGGGGS (SEQ ID NO: 190) |
| 13E: (GGGS)3 | GGGGSGGGGSGGGGS |
| | (SEQ ID NO: 191) |
| 13E: Rigid | EAAAK (SEQ ID NO: 192) |
| 13E: (GGS)6 | GGSGGSGGSGGSGGSGGS |
| | (SEQ ID NO: 193) |
| 13E: XTEN | SGSETPGTSESATPES |
| | (SEQ ID NO: 194) |
| 7B | GS |
| 13F | GS |
| 7C | GS |
| 8B | GS |
| 8D | GS |
| 8E | GS |
| 7A: Δ984-1090, | GS |
| Δ1026-1090, | |
| Δ1053-1090 | |
| 7A: Δ1-125, | GSGGGGS (SEQ ID NO: 190) |
| Δ1-88, Δ1-72 | |
| 9B | GS |
| 9C | GS |
| 9D | GS |
| 16A | GS |
| 16C | GS |
| 16D | GS |
| 17D | GS |
| 10A | GS |
| 18A | GS |
| 10B | GS |
| 18B | GS |
| 18C | GS |
| 19A | GS |
| 19B | GS |
| 10C | GS |
| 10D | GS |
| 10E | GS |
| 1OF | GS |
| 22A | GS |
| 22A | GS |

TABLE 7
Disease information for disease-relevant mutations

| Full length candidates | Gene | Disease |
|---|---|---|
| NM_000054.4(AVPR2):c.878G>A | AVPR2 | Nephrogenic diabetes insipidus, |
| (p.Trp293Ter) | | X-linked |
| NM_000136.2(FANCC):c.1517G>A | FANCC | Fanconi anemia, |
| (p.Trp506Ter) | | complementation group C |
| Additional simulated candiates | | |
| Candidate | Gene | Disease |
| NM_000206.2(IL2RG):c.710G>A | IL2RG | X-linked severe combined |
| (p.Trp237Ter) | | immunodeficiency |
| NM_000132.3(F8):c.3144G>A | F8 | Hereditary factor VIII |
| (p.Trp1048Ter) | | deficiency disease |
| NM_000527.4(LDLR):c.1449G>A | LDLR | Familial hypercholesterolemia |
| (p.Trp483Ter) | | |
| NM_0000712(CBS):c.162G>A | CBS | Homocystinuria due to CBS |
| (p.Trp54Ter) | | deficiency |
| NM_000518.4(HBB):c.114G>A | HBB | beta\hat{ }0\hat{ } Thalassemia\|beta |
| (p.Trp38Ter) | | Thalassemia |
| NM_000035.3(ALDOB):c.888G>A | ALDOB | Hereditary fructosuria |
| (p.Trp296Ter) | | |
| NM_004006.2(DMD):c.3747G>A | DMD | Duchenne muscular dystrophy |
| (p.Trp1249Ter) | | |
| NM_005359.5(SMAD4):c.906G>A | SMAD4 | Juvenile polyposis syndrome |
| (p.Trp302Ter) | | |
| NM_000059.3(BRCA2):c.582G>A | BRCA2 | Familial cancer of breast\|Breast- |
| (p.Trp194Ter) | | ovarian cancer, familial 2 |
| NM_000833.4(GRIN2A):c.3813G>A | GRIN2A | Epilepsy, focal, with speech |
| (p.Trp1271Ter) | | disorder and with or without |
| | | mental retardation |
| NM_002977.3(SCN9A):c.2691G>A | SCN9A | Indifference to pain, congenital, |
| (p.Trp897Ter) | | autosomal recessive |
| NM_007375.3(TARDBP):c.943G>A | TARDBP | Amyotrophic lateral sclerosis |
| (p.Ala315Thr) | | type 10 |
| NM_000492.3(CFTR):c.3846G>A | CFTR | Cystic fibrosis\|Hereditary |
| (p.Trp1282Ter) | | pancreatitis\|not |
| | | provided\|ataluren response- |
| | | Efficacy |
| NM_130838.1(UBE3A):c.2304G>A | UBE3A | Angelman syndrome |
| (p.Trp768Ter) | | |
| NM_000543.4(SMPD1):c.168G>A | SMPDI | Niemann-Pick disease, type A |
| (p.Trp56Ter) | | |
| NM_206933.2(USH2A):c.9390G>A | USH2A | Usher syndrome, type 2A |
| (p.Trp3130Ter) | | |
| NM_130799.2(MEN1):c.1269G>A | MEN1 | Hereditary cancer-predisposing |
| (p.Trp423Ter) | | syndrome |
| NM_177965.3(C8orf37):c.555G>A | C8orf37 | Retinitis pigmentosa 64 |
| (p.Trp185Ter) | | |
| NM_000249.3(MLH1):c.1998G>A | MLH1 | Lynch syndrome |
| (p.Trp666Ter) | | |
| NM_000548.4(TSC2):c.2108G>A | TSC2 | Tuberous sclerosis 2\|Tuberous |
| (p.Trp703Ter) | | sclerosis syndrome |
| NM_000267.3(NF1):c.7044G>A | NF1 | Neurofibromatosis, type 1 |
| (p.Trp2348Ter) | | |
| NM_000179.2(MSH6):c.3020G>A | MSH6 | Lynch syndrome |
| (p.Trp1007Ter) | | |
| NM_000344.3(SMN1):c.305G>A | SMN1 | Spinal muscular atrophy, type |
| (p.Trp102Ter) | | II\|Kugelberg-Welander disease |
| NM_024577.3(SH3TC2):c.920G>A | SH3TC2 | Charcot-Marie-Tooth disease, |
| (p.Trp307Ter) | | type 4C |
| NM_001369.2(DNAH5):c.8465G>A | DNAH5 | Primary ciliary dyskinesia |
| (p.Trp2822Ter) | | |
| NM_004992.3(MECP2):c.311G>A | MECP2 | Rett syndrome |
| (p.Trp104Ter) | | |
| NM_032119.3(ADGRV1):c.7406G>A | ADGRV1 | Usher syndrome, type 2C |
| (p.Trp2469Ter) | | |
| NM_017651,4(AHI1):c.2174G>A | AHI1 | Joubert syndrome 3 |
| (p.Trp725Ter) | | |
| NM_004562.2(PRKN):c.1358G>A | PRKN | Parkinson disease 2 |
| (p.Trp453Ter) | | |
| NM_000090.3(COL3A1):c.3833G>A | COL3A1 | Ehlers-Danlos syndrome, type 4 |
| (p.Trp1278Ter) | | |
| NM_007294.3(BRCA1):c.5511G>A | BRCA1 | Familial cancer of breast\|Breast- |
| (p.Trp1837Ter) | | ovarian cancer, familial 1 |
| NM_000256.3(MYBPC3):c.3293G>A | MYBPC3 | Primary familial hypertrophic |
| (p.Trp1098Ter) | | cardiomyopathy |
| NM_000038.5(APC):c.1262G>A | APC | Familial adenomatous polyposis |
| (p.Trp421Ter) | | 1 |
| NM_001204.6(BMPR2):c.893G>A | BMPR2 | Primary pulmonary |
| (P.W298*) | | hypertension |

TABLE 8
Key plasmids used in this study

| Plasmid | |
|---|---|
| name | Description |
| pAB0006 | CMV-Cluciferase-polyA EF1a-G-luciferase-poly A |
| pAB0040 | CMV-Cluciferase(STOP85)-polyA EF1a-G-luciferase- |
| | polyA |
| pAB0048 | pCDNA-ADAR2-N-terminal B12-HIV NES |
| pAB0050 | pAB0001-A02 (crRNA backbone) |
| pAB0051 | pAB0001-B06 (crRNA backbone) |
| pAB0052 | pAB0001-B11 (crRNA backbone) |
| pAB0053 | pAB0001-B12 (crRNA backbone) |
| pAB0014.B6 | EF1a-BsiWI-Cas13b6-NES-mapk |
| pAB0013.B11 | EF1a-BsiWI-Cas13b11-NES-HIV |
| pAB0013.B12 | EF1a-BsiWI-Cas13b12-NES-HIV |
| pAB0051 | pAB0001-B06 (crRNA backbone) |
| pAB0052 | pAB0001-B11 (crRNA backbone) |
| pAB0053 | pAB0001-B12 (crRNA backbone) |
| pAB0079 | pCDNA-ADAR1hu-EQmutant-N-terminal destination |
| | vector |
| pAB0085 | pCDNA-ADAR2 (E488Q)hu-EQmutant-N-terminal |
| | destination vector |
| pAB0095 | EF1a-BsiWI-Cas13-B12-NES-HIV, with double H |
| | HEPN mutant |
| pAB0114 | pCDNA-wtADAR2hu-EQmutant-N-terminal destination |
| | vector |
| pAB0120 | Luciferase ADAR guide optimal (guide 24 from |
| | wC0054) |
| pAB0122 | pAB0001-B12 NT guide for ADAR experiments |
| pAB0151 | pCDNA-ADAR2hu-EQmutant-N-terminal destination |
| | vector C-term delta 984-1090 |
| pAB0180 | T375G specificity mutant |
| pAB0181 | T375G Cas13b C-term delta 984-1090 |

TABLE 9
Guide/shRNA sequences used in this study
for knockdown in mammalian cells

| | | Interference | | First |
|---|---|---|---|---|
| Name | Spacer sequence | Mechanism | Notes | FIG. |
| Bacterial | GCCAGCUUUCCGGGCAUUGG | Cas13b | Used for all | |
| PFS guide | CUUCCAUC (SEQ ID NO: | | orthologs | |
| | 195) | | | |
| Cas13a- | GCCAGCTTTCCGGGCATTGG | Cas13a | Used for all | FIG. 5B |
| Gluc | CTTCCATC (SEQ ID NO: | | Cas13a | |
| guide 1 | 196) | | orthologs | |
| Cas13a- | ACCCAGGAATCTCAGGAATG | Cas13a | Used for all | FIG. 5B |
| Gluc | TCGACGAT (SEQ ID NO: | | Cas13a | |
| guide 2 | 197) | | orthologs | |
| Cas13a- | AGGGTTTTCCCAGTCACGAC | Cas13a | Used for all | FIG. 5B |
| non- | GTTGTAAA (SEQ ID NO: | | Cas13a | |
| targeting | 198) | | orthologs | |
| guide | | | | |
| (LacZ) | | | | |
| Cas13b- | GGGCATTGGCTTCCATCTCTT | Cas13b | Used for | FIG. 5B |
| Gluc | TGAGCACCT (SEQ ID NO: | | orthologs 1-3, | |
| guide 1.1 | 199) | | 6, 7, 10, 11, | |
| | | | 12, 14, 15 | |
| Cas13b- | GUGCAGCCAGCUUUCCGGGC | Cas13b | Used for | FIG. 5B |
| Gluc | AUUGGCUUCC (SEQ ID | | ortholog 4 | |
| guide 1.2 | NO: 200) | | | |
| Cas13b- | GCAGCCAGCUUUCCGGGCAU | Cas13b | Used for | FIG. 5B |
| Gluc | UGGCUUCCAU (SEQ ID | | ortholog 5 | |
| guide 1.3 | NO: 201) | | | |
| Cas13b- | GGCUUCCAUCUCUUUGAGCA | Cas13b | Used for | FIG. 5B |
| Gluc | CCUCCAGCGG (SEQ ID | | ortholog 8, 9 | |
| guide 1.4 | NO: 202) | | | |
| Cas13b- | GGAAUGUCGACGAUCGCCUC | Cas13b | Used for | FIG. 5B |
| Gluc | GCCUAUGCCG (SEQ ID | | ortholog 13 | |
| guide 1.5 | NO: 203) | | | |
| Cas13b- | GAAUGUCGACGAUCGCCUCG | Cas13b | Used for | FIG. 5B |
| Gluc | CCUAUGCCGC (SEQ ID | | orthologs 1-3, | |
| guide 2.1 | NO: 204) | | 6, 7, 10, 11, | |
| | | | 14, 15 | |
| Cas13b- | GACCUGUGCGAUGAACUGCU | Cas13b | Used for | FIG. 5B |
| Gluc | CCAUGGGCUC (SEQ ID | | ortholog 12 | |
| guide 2.2 | NO: 205) | | | |
| Cas13b- | GUGUGGCAGCGUCCUGGGA | Cas13b | Used for | FIG. 5B |
| Gluc | UGAACUUCUUC (SEQ ID | | ortholog 4 | |
| guide 2.2 | NO: 206) | | | |
| Cas13b- | GUGGCAGCGUCCUGGGAUG | Cas13b | Used for | FIG. 5B |
| Gluc | AACUUCUUCAU (SEQ ID | | ortholog 5 | |
| guide 2.3 | NO: 207) | | | |
| Cas13b- | GCUUCUUGCCGGGCAACUUC | Cas13b | Used for | FIG. 5B |
| Gluc | CCGCGGUCAG (SEQ ID | | ortholog 8, 9 | |
| guide 2.4 | NO: 208) | | | |
| Cas13b- | GCAGGGUUUUCCCAGUCACG | Cas13b | Used for | FIG. 5B |
| Gluc | ACGUUGUAAAA (SEQ ID | | ortholog 13 | |
| guide 2.6 | NO: 209) | | | |
| Cas13b- | GCAGGGUUUUCCCAGUCACG | Cas13b | Used for all | FIG. 5B |
| non | ACGUUGUAAAA (SEQ ID | | orthologs | |
| targeting | NO: 210) | | | |
| guide | | | | |
| Cas13a- | ACCCAGGAAUCUCAGGAAUG | Cas13a | | FIG. 5E |
| Gluc | UCGACGAU (SEQ ID NO: | | | |
| guide- | 211) | | | |
| RNASeq | | | | |
| shRNA- | CAGCTTTCCGGGCATTGGCTT | shRNA | | FIG. 5F |
| Gluc | (SEQ ID NO: 212) | | | |
| guide | | | | |
| Cas13b- | CCGCUGGAGGUGCUCAAAGA | Cas13b | | FIG. 5F |
| Gluc | GAUGGAAGCC (SEQ ID | | | |
| guide- | NO: 213) | | | |
| RNASeq | | | | |
| Cas13a- | GCCAGCTTTCCGGGCATTGG | Cas13a | | FIG. 12A |
| Gluc- | CTTCCATC (SEQ ID NO: | | | |
| guide-1 | 214) | | | |
| Cas13a- | ACCCAGGAATCTCAGGAATG | Cas13a | | FIG. 12A |
| Gluc- | TCGACGAT (SEQ ID NO: | | | |
| guide-2 | 215) | | | |
| Cas13b- | GGGCATTGGCTTCCATCTCTT | Cas13b | | FIG. 12A |
| Gluc-opt- | TGAGCACCT (SEQ ID NO: | | | |
| guide-1 | 216) | | | |
| Cas13b- | GAAUGUCGACGAUCGCCUCG | Cas13b | | FIG. 12A |
| Gluc-opt- | CCUAUGCCGC (SEQ ID | | | |
| guide-2 | NO: 217) | | | |
| Cas13a | CAAGGCACTCTTGCCTACGC | Cas13a | | FIG. 12B |
| KRAS | CACCAGCT (SEQ ID NO: | | | |
| guide 1 | 218) | | | |
| Cas13a | TCATATTCGTCCACAAAATG | Cas13a | | FIG. 12B |
| KRAS | ATTCTGAA (SEQ ID NO: | | | |
| guide 2 | 219) | | | |
| Cas13a | ATTATTTATGGCAAATACAC | Cas13a | | FIG. 12B |
| KRAS | AAAGAAAG (SEQ ID NO: | | | |
| guide 3 | 220) | | | |
| Cas13a | GAATATCTTCAAATGATTTAG | Cas13a | | FIG. 12B |
| KRAS | TATTATT (SEQ ID NO: | | | |
| guide 4 | 221) | | | |
| Cas13a | ACCATAGGTACATCTTCAGA | Cas13a | | FIG. 12B |
| KRAS | GTCCTTAA (SEQ ID NO: | | | |
| guide 5 | 222) | | | |
| Cas13b | GTCAAGGCACTCTTGCCTAC | Cas13b | | FIG. 12B |
| KRAS | GCCACCAGCT (SEQ ID | | | |
| guide 1 | NO: 223) | | | |
| Cas13b | GATCATATTCGTCCACAAAA | Cas13b | | FIG. 12B |
| KRAS | TGATTCTGAA (SEQ ID | | | |
| guide 2 | NO: 224) | | | |
| Cas13b | GTATTATTTATGGCAAATAC | Cas13b | | FIG. 12B |
| KRAS | ACAAAGAAAG (SEQ ID | | | |
| guide 3 | NO: 225) | | | |
| Cas13b | GTGAATATCTTCAAATGATT | Cas13b | | FIG. 12B |
| KRAS | TAGTATTATT (SEQ ID | | | |
| guide 4 | NO: 226) | | | |
| Cas13b | GGACCATAGGTACATCTTCA | Cas13b | | FIG. 12B |
| KRAS | GAGTCCTTAA (SEQ ID | | | |
| guide 5 | NO: 227) | | | |
| shRNA | aagagtgccttgacgataca | shRNA | | FIG. 12B |
| KRAS | gcCTCGAGgctgtatcgtca | | | |
| guide 1 | aggcactctt (SEQ ID | | | |
| | NO: 228) | | | |
| shRNA | aatcattttgtggacgaata | shRNA | | FIG. 12B |
| KRAS | tCTCGAGatattcgtccaca | | | |
| guide 2 | aaatgatt (SEQ ID NO: | | | |
| | 229) | | | |
| shRNA | aaataatactaaatcatttg | shRNA | | FIG. 12B |
| KRAS | aCTCGAGtcaaatgatttag | | | |
| guide 3 | tattattt (SEQ ID NO: | | | |
| | 230) | | | |
| shRNA | aataatactaaatcatttga | shRNA | | FIG. 12B |
| KRAS | aCTCGAGttcaaatgattta | | | |
| guide 4 | gtattatt (SEQ ID NO: | | | |
| | 231) | | | |
| shRNA | aaggactctgaagatgtacc | shRNA | | FIG. 12B |
| KRAS | tCTCGAGaggtacatcttca | | | |
| guide 5 | gagtcctt (SEQ ID NO: | | | |
| | 232) | | | |

TABLE 10
Guide sequences used for Gluc knockdown

| | | | | First |
|---|---|---|---|---|
| Name | Spacer sequence | Position | Notes | FIG. |
| Gluc | GAGATCAGGGCAAACAG | 2 | Note that the Cas13a spacers | 5C |
| tiling | AACTTTGACTCCC (SEQ | | are truncated by two | |
| guide 1 | ID NO: 233) | | nucleotides at the 5′ end | |
| Gluc | GGATGCAGATCAGGGCA | 7 | Note that the Cas13a spacers | 5C |
| tiling | AACAGAACTTTGA (SEQ | | are truncated by two | |
| guide 2 | ID NO: 234) | | nucleotides at the 5′ end | |
| Gluc | GCACAGCGATGCAGATCA | 13 | Note that the Cas13a spacers | 5C |
| tiling | GGGCAAACAGAA (SEQ ID | | are truncated by two | |
| guide 3 | NO: 235) | | nucleotides at the 5′ end | |
| Gluc | GCTCGGCCACAGCGATGC | 19 | Note that the Cas13a spacers | 5C |
| tiling | AGATCAGGGCAA (SEQ ID | | are truncated by two | |
| guide 4 | NO: 236) | | nucleotides at the 5′ end | |
| Gluc | GGGGCTTGGCCTCGGCCA | 28 | Note that the Cas13a spacers | 5C |
| tiling | CAGCGATGCAGA (SEQ ID | | are truncated by two | |
| guide 5 | NO: 237) | | nucleotides at the 5′ end | |
| Gluc | GTGGGCTTGGCCTCGGCC | 29 | Note that the Cas13a spacers | 5C |
| tiling | ACAGCGATGCAG (SEQ ID | | are truncated by two | |
| guide 6 | NO: 238 | | nucleotides at the 5′ end | |
| Gluc | GTCTCGGTGGGCTTGGCC | 35 | Note that the Cas13a spacers | 5C |
| tiling | TCGGCCACAGCG (SEQ ID | | are truncated by two | |
| guide 7 | NO: 239) | | nucleotides at the 5′ end | |
| Gluc | GTTCGTTGTTCTCGGTGG | 43 | Note that the Cas13a spacers | 5C |
| tiling | GCTTGGCCTCGG (SEQ ID | | are truncated by two | |
| guide 8 | NO: 240) | | nucleotides at the 5′ end | |
| Gluc | GGAAGTCTTCGTTGTTCT | 49 | Note that the Cas13a spacers | 5C |
| tiling | CGGTGGGCTTGG (SEQ ID | | are truncated by two | |
| guide 9 | NO: 241) | | nucleotides at the 5′ end | |
| Gluc | GATGTTGAAGTCTTCGTT | 54 | Note that the Cas13a spacers | 5C |
| tiling | GTTCTCGGTGGG (SEQ ID | | are truncated by two | |
| guide 10 | NO: 242) | | nucleotides at the 5′ end | |
| Gluc | GCGGCCACGATGTTGAAG | 62 | Note that the Cas13a spacers | 5C |
| tiling | TCTTCGTTGTTC (SEQ ID | | are truncated by two | |
| guide 11 | NO: 243) | | nucleotides at the 5′ end | |
| Gluc | GTGGCCACGGCCACGATG | 68 | Note that the Cas13a spacers | 5C |
| tiling | TTGAAGTCTTCG (SEQ ID | | are truncated by two | |
| guide 12 | NO: 244) | | nucleotides at the 5′ end | |
| Gluc | GGTTGCTGGCCACGGCCA | 73 | Note that the Cas13a spacers | 5C |
| tiling | CGATGTTGAAGT (SEQ ID | | are truncated by two | |
| guide 13 | NO: 245) | | nucleotides at the 5′ end | |
| Gluc | GTCGCGAAGTTGCTGGCC | 80 | Note that the Cas13a spacers | 5C |
| tiling | ACGGCCACGATG (SEQ ID | | are truncated by two | |
| guide 14 | NO: 246) | | nucleotides at the 5′ end | |
| Gluc | GCCGTGGTCGCGAAGTTG | 86 | Note that the Cas13a spacers | 5C |
| tiling | CTGGCCACGGCC (SEQ ID | | are truncated by two | |
| guide 15 | NO: 247) | | nucleotides at the 5′ end | |
| Gluc | GCGAGATCCGTGGTCGCG | 92 | Note that the Cas13a spacers | 5C |
| tiling | AAGTTGCTGGCC (SEQ ID | | are truncated by two | |
| guide 16 | NO: 248) | | nucleotides at the 5′ end | |
| Gluc | GCAGCATCGAGATCCGTG | 98 | Note that the Cas13a spacers | 5C |
| tiling | GTCGCGAAGTTG (SEQ ID | | are truncated by two | |
| guide 17 | NO: 249) | | nucleotides at the 5′ end | |
| Gluc | GGGTCAGCATCGAGATCC | 101 | Note that the Cas13a spacers | 5C |
| tiling | GTGGTCGCGAAG (SEQ ID | | are truncated by two | |
| guide 18 | NO: 250) | | nucleotides at the 5′ end | |
| Gluc | GCTTCCCGCGGTCAGCAT | 109 | Note that the Cas13a spacers | 5C |
| tiling | CGAGATCCGTGG (SEQ ID | | are truncated by two | |
| guide 19 | NO: 251) | | nucleotides at the 5′ end | |
| Gluc | GGGGCAACTTCCCGCGGT | 115 | Note that the Cas13a spacers | 5C |
| tiling | CAGCATCGAGAT (SEQ ID | | are truncated by two | |
| guide 20 | NO: 252) | | nucleotides at the 5′ end | |
| Gluc | GTCTTGCCGGGCAACTTC | 122 | Note that the Cas13a spacers | 5C |
| tiling | CCGCGGTCAGCA (SEQ ID | | are truncated by two | |
| guide 21 | NO: 253) | | nucleotides at the 5′ end | |
| Gluc | GGCAGCTTCTTGCCGGGC | 128 | Note that the Cas13a spacers | 5C |
| tiling | AACTTCCCGCGG (SEQ ID | | are truncated by two | |
| guide 22 | NO: 254) | | nucleotides at the 5′ end | |
| Gluc | GCCAGCGGCAGCTTCTTG | 134 | Note that the Cas13a spacers | 5C |
| tiling | CCGGGCAACTTC (SEQ ID | | are truncated by two | |
| guide 23 | NO: 255) | | nucleotides at the 5′ end | |
| Gluc | GCACCTCCAGCGGCAGCT | 139 | Note that the Cas13a spacers | 5C |
| tiling | TCTTGCCGGGCA (SEQ ID | | are truncated by two | |
| guide 24 | NO: 256) | | nucleotides at the 5′ end | |
| Gluc | GCTTTGAGCACCTCCAGC | 146 | Note that the Cas13a spacers | 5C |
| tiling | GGCAGCTTCTTG (SEQ ID | | are truncated by two | |
| guide 25 | NO: 257) | | nucleotides at the 5′ end | |
| Gluc | GCATCTCTTTGAGCACCT | 151 | Note that the Cas13a spacers | 5C |
| tiling | CCAGCGGCAGCT (SEQ ID | | are truncated by two | |
| guide 26 | NO: 258) | | nucleotides at the 5′ end | |
| Gluc | GTCCATCTCTTTGAGCAC | 153 | Note that the Cas13a spacers | 5C |
| tiling | CTCCAGCGGCAG (SEQ ID | | are truncated by two | |
| guide 27 | NO: 259) | | nucleotides at the 5′ end | |
| Gluc | GGGCATTGGCTTCCATCT | 163 | Note that the Cas13a spacers | 5C |
| tiling | CTTTGAGCACCT (SEQ ID | | are truncated by two | |
| guide 28 | NO: 260) | | nucleotides at the 5′ end | |
| Gluc | GTCCGGGCATTGGCTTCC | 167 | Note that the Cas13a spacers | 5C |
| tiling | ATCTCTTTGAGC (SEQ ID | | are truncated by two | |
| guide 29 | NO: 261) | | nucleotides at the 5′ end | |
| Gluc | GGCCAGCTTTCCGGGCAT | 175 | Note that the Cas13a spacers | 5C |
| tiling | TGGCTTCCATCT (SEQ ID | | are truncated by two | |
| guide 30 | NO: 262) | | nucleotides at the 5′ end | |
| Gluc | GGGTGCAGCCAGCTTTCC | 181 | Note that the Cas13a spacers | 5C |
| tiling | GGGCATTGGCTT (SEQ ID | | are truncated by two | |
| guide 31 | NO: 263) | | nucleotides at the 5′ end | |
| Gluc | GAGCCCCTGGTGCAGCCA | 188 | Note that the Cas13a spacers | 5C |
| tiling | GCTTTCCGGGCA (SEQ ID | | are truncated by two | |
| guide 32 | NO: 264) | | nucleotides at the 5′ end | |
| Gluc | GATCAGACAGCCCCTGGT | 195 | Note that the Cas13a spacers | 5C |
| tiling | GCAGCCAGCTTT (SEQ ID | | are truncated by two | |
| guide 33 | NO: 265) | | nucleotides at the 5′ end | |
| Gluc | GGCAGATCAGACAGCCCC | 199 | Note that the Cas13a spacers | 5C |
| tiling | TGGTGCAGCCAG (SEQ ID | | are truncated by two | |
| guide 34 | NO: 266) | | nucleotides at the 5′ end | |
| Gluc | GACAGGCAGATCAGACA | 203 | Note that the Cas13a spacers | 5C |
| tiling | GCCCCTGGTGCAG (SEQ | | are truncated by two | |
| guide 35 | ID NO: 267) | | nucleotides at the 5′ end | |
| Gluc | GTGATGTGGGACAGGCA | 212 | Note that the Cas13a spacers | 5C |
| tiling | GATCAGACAGCCC (SEQ | | are truncated by two | |
| guide 36 | ID NO: 268) | | nucleotides at the 5′ end | |
| Gluc | GACTTGATGTGGGACAGG | 215 | Note that the Cas13a spacers | 5C |
| tiling | CAGATCAGACAG (SEQ ID | | are truncated by two | |
| guide 37 | NO: 269) | | nucleotides at the 5′ end | |
| Gluc | GGGGCGTGCACTTGATGT | 223 | Note that the Cas13a spacers | 5C |
| tiling | GGGACAGGCAGA (SEQ ID | | are truncated by two | |
| guide 38 | NO: 270) | | nucleotides at the 5′ end | |
| Gluc | GCTTCATCTTGGGCGTGC | 232 | Note that the Cas13a spacers | 5C |
| tiling | ACTTGATGTGGG (SEQ ID | | are truncated by two | |
| guide 39 | NO: 271) | | nucleotides at the 5′ end | |
| Gluc | GTGAACTTCTTCATCTTG | 239 | Note that the Cas13a spacers | 5C |
| tiling | GGCGTGCACTTG (SEQ ID | | are truncated by two | |
| guide 40 | NO: 272) | | nucleotides at the 5′ end | |
| Gluc | GGGATGAACTTCTTCATC | 242 | Note that the Cas13a spacers | 5C |
| tiling | TTGGGCGTGCAC (SEQ ID | | are truncated by two | |
| guide 41 | NO: 273) | | nucleotides at the 5′ end | |
| Gluc | GTGGGATGAACTTCTTCA | 244 | Note that the Cas13a spacers | 5C |
| tiling | TCTTGGGCGTGC (SEQ ID | | are truncated by two | |
| guide 42 | NO: 274) | | nucleotides at the 5′ end | |
| Gluc | GGGCAGCGTCCTGGGATG | 254 | Note that the Cas13a spacers | 5C |
| tiling | AACTTCTTCATC (SEQ ID | | are truncated by two | |
| guide 43 | NO: 275) | | nucleotides at the 5′ end | |
| Gluc | GGGTGTGGCAGCGTCCTG | 259 | Note that the Cas13a spacers | 5C |
| tiling | GGATGAACTTCT (SEQ ID | | are truncated by two | |
| guide 44 | NO: 276) | | nucleotides at the 5′ end | |
| Gluc | GTTCGTAGGTGTGGCAGC | 265 | Note that the Cas13a spacers | 5C |
| tiling | GTCCTGGGATGA (SEQ ID | | are truncated by two | |
| guide 45 | NO: 277) | | nucleotides at the 5′ end | |
| Gluc | GCGCCTTCGTAGGTGTGG | 269 | Note that the Cas13a spacers | 5C |
| tiling | CAGCGTCCTGGG (SEQ ID | | are truncated by two | |
| guide 46 | NO: 278) | | nucleotides at the 5′ end | |
| Gluc | GTCTTTGTCGCCTTCGTA | 276 | Note that the Cas13a spacers | 5C |
| tiling | GGTGTGGCAGCG (SEQ ID | | are truncated by two | |
| guide 47 | NO: 279) | | nucleotides at the 5′ end | |
| Gluc | GCTTTGTCGCCTTCGTAG | 275 | Note that the Cas13a spacers | 5C |
| tiling | GTGTGGCAGCGT (SEQ ID | | are truncated by two | |
| guide 48 | NO: 280) | | nucleotides at the 5′ end | |
| Gluc | GTGCCGCCCTGTGCGGAC | 293 | Note that the Cas13a spacers | 5C |
| tiling | TCTTTGTCGCCT (SEQ ID | | are truncated by two | |
| guide 49 | NO: 281) | | nucleotides at the 5′ end | |
| Gluc | GTATGCCGCCCTGTGCGG | 295 | Note that the Cas13a spacers | 5C |
| tiling | ACTCTTTGTCGC (SEQ ID | | are truncated by two | |
| guide 50 | NO: 282) | | nucleotides at the 5′ end | |
| Gluc | GCCTCGCCTATGCCGCCC | 302 | Note that the Cas13a spacers | 5C |
| tiling | TGTGCGGACTCT (SEQ ID | | are truncated by two | |
| guide 51 | NO: 283) | | nucleotides at the 5′ end | |
| Gluc | GGATCGCCTCGCCTATGC | 307 | Note that the Cas13a spacers | 5C |
| tiling | CGCCCTGTGCGG (SEQ ID | | are truncated by two | |
| guide 52 | NO: 284) | | nucleotides at the 5′ end | |
| Gluc | GATGTCGACGATCGCCTC | 315 | Note that the Cas13a spacers | 5C |
| tiling | GCCTATGCCGCC (SEQ ID | | are truncated by two | |
| guide 53 | NO: 285) | | nucleotides at the 5′ end | |
| Gluc | GCAGGAATGTCGACGATC | 320 | Note that the Cas13a spacers | 5C |
| tiling | GCCTCGCCTATG (SEQ ID | | are truncated by two | |
| guide 54 | NO: 286) | | nucleotides at the 5′ end | |
| Gluc | GAATCTCAGGAATGTCGA | 325 | Note that the Cas13a spacers | 5C |
| tiling | CGATCGCCTCGC (SEQ ID | | are truncated by two | |
| guide 55 | NO: 287) | | nucleotides at the 5′ end | |
| Gluc | GCCCAGGAATCTCAGGAA | 331 | Note that the Cas13a spacers | 5C |
| tiling | TGTCGACGATCG (SEQ ID | | are truncated by two | |
| guide 56 | NO: 288) | | nucleotides at the 5′ end | |
| Gluc | GCCTTGAACCCAGGAATC | 338 | Note that the Cas13a spacers | 5C |
| tiling | TCAGGAATGTCG (SEQ ID | | are truncated by two | |
| guide 57 | NO: 289) | | nucleotides at the 5′ end | |
| Gluc | GCCAAGTCCTTGAACCCA | 344 | Note that the Cas13a spacers | 5C |
| tiling | GGAATCTCAGGA (SEQ ID | | are truncated by two | |
| guide 58 | NO: 290) | | nucleotides at the 5′ end | |
| Gluc | GTGGGCTCCAAGTCCTTG | 350 | Note that the Cas13a spacers | 5C |
| tiling | AACCCAGGAATC (SEQ ID | | are truncated by two | |
| guide 59 | NO: 291) | | nucleotides at the 5′ end | |
| Gluc | GCCATGGGCTCCAAGTCC | 353 | Note that the Cas13a spacers | 5C |
| tiling | TTGAACCCAGGA (SEQ ID | | are truncated by two | |
| guide 60 | NO: 292) | | nucleotides at the 5′ end | |
| Gluc | GGAACTGCTCCATGGGCT | 361 | Note that the Cas13a spacers | 5C |
| tiling | CCAAGTCCTTGA (SEQ ID | | are truncated by two | |
| guide 61 | NO: 293) | | nucleotides at the 5′ end | |
| Gluc | GTGCGATGAACTGCTCCA | 367 | Note that the Cas13a spacers | 5C |
| tiling | TGGGCTCCAAGT (SEQ ID | | are truncated by two | |
| guide 62 | NO: 294) | | nucleotides at the 5′ end | |
| Gluc | GGACCTGTGCGATGAACT | 373 | Note that the Cas13a spacers | 5C |
| tiling | GCTCCATGGGCT (SEQ ID | | are truncated by two | |
| guide 63 | NO: 295) | | nucleotides at the 5′ end | |
| Gluc | GACAGATCGACCTGTGCG | 380 | Note that the Cas13a spacers | 5C |
| tiling | ATGAACTGCTCC (SEQ ID | | are truncated by two | |
| guide 64 | NO: 296) | | nucleotides at the 5′ end | |
| Gluc | GACACACAGATCGACCTG | 384 | Note that the Cas13a spacers | 5C |
| tiling | TGCGATGAACTG (SEQ ID | | are truncated by two | |
| guide 65 | NO: 297) | | nucleotides at the 5′ end | |
| Gluc | GTGCAGTCCACACACAGA | 392 | Note that the Cas13a spacers | 5C |
| tiling | TCGACCTGTGCG (SEQ ID | | are truncated by two | |
| guide 66 | NO: 298) | | nucleotides at the 5′ end | |
| Gluc | GCCAGTTGTGCAGTCCAC | 399 | Note that the Cas13a spacers | 5C |
| tiling | ACACAGATCGAC (SEQ ID | | are truncated by two | |
| guide 67 | NO: 299) | | nucleotides at the 5′ end | |
| Gluc | GGGCAGCCAGTTGTGCAG | 404 | Note that the Cas13a spacers | 5C |
| tiling | TCCACACACAGA (SEQ ID | | are truncated by two | |
| guide 68 | NO: 300) | | nucleotides at the 5′ end | |
| Gluc | GTTTGAGGCAGCCAGTTG | 409 | Note that the Cas13a spacers | 5C |
| tiling | TGCAGTCCACAC (SEQ ID | | are truncated by two | |
| guide 69 | NO: 301) | | nucleotides at the 5′ end | |
| Gluc | GAAGCCCTTTGAGGCAGC | 415 | Note that the Cas13a spacers | 5C |
| tiling | CAGTTGTGCAGT (SEQ ID | | are truncated by two | |
| guide 70 | NO: 302) | | nucleotides at the 5′ end | |
| Gluc | GCACGTTGGCAAGCCCTT | 424 | Note that the Cas13a spacers | 5C |
| tiling | TGAGGCAGCCAG (SEQ ID | | are truncated by two | |
| guide 71 | NO: 303) | | nucleotides at the 5′ end | |
| Gluc | GACTGCACGTTGGCAAGC | 428 | Note that the Cas13a spacers | 5C |
| tiling | CCTTTGAGGCAG (SEQ ID | | are truncated by two | |
| guide 72 | NO: 304) | | nucleotides at the 5′ end | |
| Gluc | GGGTCAGAACACTGCACG | 437 | Note that the Cas13a spacers | 5C |
| tiling | TTGGCAAGCCCT (SEQ ID | | are truncated by two | |
| guide 73 | NO: 305) | | nucleotides at the 5′ end | |
| Gluc | GCAGGTCAGAACACTGCA | 439 | Note that the Cas13a spacers | 5C |
| tiling | CGTTGGCAAGCC (SEQ ID | | are truncated by two | |
| guide 74 | NO: 306) | | nucleotides at the 5′ end | |
| Gluc | GAGCAGGTCAGAACACT | 441 | Note that the Cas13a spacers | 5C |
| tiling | GCACGTTGGCAAG (SEQ | | are truncated by two | |
| guide 75 | ID NO: 307) | | nucleotides at the 5′ end | |
| Gluc | GGCCACTTCTTGAGCAGG | 452 | Note that the Cas13a spacers | 5C |
| tiling | TCAGAACACTGC (SEQ ID | | are truncated by two | |
| guide 76 | NO: 308) | | nucleotides at the 5′ end | |
| Gluc | GCGGCAGCCACTTCTTGA | 457 | Note that the Cas13a spacers | 5C |
| tiling | GCAGGTCAGAAC (SEQ ID | | are truncated by two | |
| guide 77 | NO: 309) | | nucleotides at the 5′ end | |
| Gluc | GTGCGGCAGCCACTTCTT | 459 | Note that the Cas13a spacers | 5C |
| tiling | GAGCAGGTCAGA (SEQ ID | | are truncated by two | |
| guide 78 | NO: 310) | | nucleotides at the 5′ end | |
| Gluc | GAGCGTTGCGGCAGCCAC | 464 | Note that the Cas13a spacers | 5C |
| tiling | TTCTTGAGCAGG (SEQ ID | | are truncated by two | |
| guide 79 | NO: 311) | | nucleotides at the 5′ end | |
| Gluc | GAAAGGTCGCACAGCGTT | 475 | Note that the Cas13a spacers | 5C |
| tiling | GCGGCAGCCACT (SEQ ID | | are truncated by two | |
| guide 80 | NO: 312) | | nucleotides at the 5′ end | |
| Gluc | GCTGGCAAAGGTCGCACA | 480 | Note that the Cas13a spacers | 5C |
| tiling | GCGTTGCGGCAG (SEQ ID | | are truncated by two | |
| guide 81 | NO: 313) | | nucleotides at the 5′ end | |
| Gluc | GGGCAAAGGTCGCACAG | 478 | Note that the Cas13a spacers | 5C |
| tiling | CGTTGCGGCAGCC (SEQ | | are truncated by two | |
| guide 82 | ID NO: 314) | | nucleotides at the 5′ end | |
| Gluc | GTGGATCTTGCTGGCAAA | 489 | Note that the Cas13a spacers | 5C |
| tiling | GGTCGCACAGCG (SEQ ID | | are truncated by two | |
| guide 83 | NO: 315) | | nucleotides at the 5′ end | |
| Gluc | GCACCTGGCCCTGGATCT | 499 | Note that the Cas13a spacers | 5C |
| tiling | TGCTGGCAAAGG (SEQ ID | | are truncated by two | |
| guide 84 | NO: 316) | | nucleotides at the 5′ end | |
| Gluc | GTGGCCCTGGATCTTGCT | 495 | Note that the Cas13a spacers | 5C |
| tiling | GGCAAAGGTCGC (SEQ ID | | are truncated by two | |
| guide 85 | NO: 317) | | nucleotides at the 5′ end | |
| Gluc | GTGATCTTGTCCACCTGG | 509 | Note that the Cas13a spacers | 5C |
| tiling | CCCTGGATCTTG (SEQ ID | | are truncated by two | |
| guide 86 | NO: 318) | | nucleotides at the 5′ end | |
| Gluc | GCCCCTTGATCTTGTCCA | 514 | Note that the Cas13a spacers | 5C |
| tiling | CCTGGCCCTGGA (SEQ ID | | are truncated by two | |
| guide 87 | NO: 319) | | nucleotides at the 5′ end | |
| Gluc | GCCCTTGATCTTGTCCAC | 513 | Note that the Cas13a spacers | 5C |
| tiling | CTGGCCCTGGAT (SEQ ID | | are truncated by two | |
| guide 88 | NO: 320) | | nucleotides at the 5′ end | |
| Gluc | GCCTTGATCTTGTCCACC | 512 | Note that the Cas13a spacers | 5C |
| tiling | TGGCCCTGGATC (SEQ ID | | are truncated by two | |
| guide 89 | NO: 321) | | nucleotides at the 5′ end | |
| Gluc | GGCAAAGGTCGCACAGC | 477 | Note that the Cas13a spacers | 5C |
| tiling | GTTGCGGCAGCCA (SEQ | | are truncated by two | |
| guide 90 | ID NO: 322) | | nucleotides at the 5′ end | |
| Gluc | GCAAAGGTCGCACAGCGT | 476 | Note that the Cas13a spacers | 5C |
| tiling | TGCGGCAGCCAC (SEQ ID | | are truncated by two | |
| guide 91 | NO: 323) | | nucleotides at the 5′ end | |
| Gluc | GAAGGTCGCACAGCGTTG | 474 | Note that the Cas13a spacers | 5C |
| tiling | CGGCAGCCACTT (SEQ ID | | are truncated by two | |
| guide 92 | NO: 324) | | nucleotides at the 5′ end | |
| Gluc | GAGGTCGCACAGCGTTGC | 473 | Note that the Cas13a spacers | 5C |
| tiling | GGCAGCCACTTC (SEQ ID | | are truncated by two | |
| guide 93 | NO: 325) | | nucleotides at the 5′ end | |
| Non- | GGTAATGCCTGGCTTGTC | N/A | Note that the Cas13a spacers | 5C |
| targeting | GACGCATAGTCTG (SEQ | | are truncated by two | |
| guide 1 | ID NO: 326) | | nucleotides at the 5′ end | |
| Non- | GGGAACCTTGGCCGTTAT | N/A | Note that the Cas13a spacers | 5C |
| targeting | AAAGTCTGACCAG (SEQ | | are truncated by two | |
| guide 2 | ID NO: 327) | | nucleotides at the 5′ end | |
| Non- | GGAGGGTGAGAATTTAG | N/A | Note that the Cas13a spacers | 5C |
| targeting | AACCAAGATTGTTG (SEQ | | are truncated by two | |
| guide 3 | ID NO: 328) | | nucleotides at the 5′ end | |

TABLE 11
Guide sequences used for Cluc knockdown

| | | | | First |
|---|---|---|---|---|
| Name | Spacer sequence | Position | Notes | FIG. |
| Cluc | GAGTCCTGGCAATGAACA | 32 | Note that the Cas13a spacers | 5D |
| tiling | GTGGCGCAGTAG (SEQ ID | | are truncated by two | |
| guide 1 | NO: 329) | | nucleotides at the 5′ end | |
| Cluc | GGGTGCCACAGCTGCTAT | 118 | Note that the Cas13a spacers | 5D |
| tiling | CAATACATTCTC (SEQ ID | | are truncated by two | |
| guide 2 | NO: 330) | | nucleotides at the 5′ end | |
| Cluc | GTTACATACTGACACATT | 197 | Note that the Cas13a spacers | 5D |
| tiling | CGGCAACATGTT (SEQ ID | | are truncated by two | |
| guide 3 | NO: 331) | | nucleotides at the 5′ end | |
| Cluc | GTATGTACCAGGTTCCTG | 276 | Note that the Cas13a spacers | 5D |
| tiling | GAACTGGAATCT (SEQ ID | | are truncated by two | |
| guide 4 | NO: 332) | | nucleotides at the 5′ end | |
| Cluc | GCCTTGGTTCCATCCAGG | 350 | Note that the Cas13a spacers | 5D |
| tiling | TTCTCCAGGGTG (SEQ ID | | are truncated by two | |
| guide 5 | NO: 333) | | nucleotides at the 5′ end | |
| Cluc | GCAGTGATGGGATTCTCA | 431 | Note that the Cas13a spacers | 5D |
| tiling | GTAGCTTGAGCG (SEQ ID | | are truncated by two | |
| guide 6 | NO: 334) | | nucleotides at the 5′ end | |
| Cluc | GAGCCTGGCATCTCAACA | 512 | Note that the Cas13a spacers | 5D |
| tiling | ACAGCGATGGTG (SEQ ID | | are truncated by two | |
| guide 7 | NO: 335) | | nucleotides at the 5′ end | |
| Cluc | GTGTCTGGGGCGATTCTT | 593 | Note that the Cas13a spacers | 5D |
| tiling | ACAGATCTTCCT (SEQ ID | | are truncated by two | |
| guide 8 | NO: 336) | | nucleotides at the 5′ end | |
| Cluc | GCTGGATCTGAAGTGAAG | 671 | Note that the Cas13a spacers | 5D |
| tiling | TCTGTATCTTCC (SEQ ID | | are truncated by two | |
| guide 9 | NO: 337) | | nucleotides at the 5′ end | |
| Cluc | GGCAACGTCATCAGGATT | 747 | Note that the Cas13a spacers | 5D |
| tiling | TCCATAGAGTGG (SEQ ID | | are truncated by two | |
| guide 10 | NO: 338) | | nucleotides at the 5′ end | |
| Cluc | GAGGCGCAGGAGATGGT | 830 | Note that the Cas13a spacers | 5D |
| tiling | GTAGTAGTAGAAG (SEQ | | are truncated by two | |
| guide 11 | ID NO: 339) | | nucleotides at the 5′ end | |
| Cluc | GAGGGACCCTGGAATTGG | 986 | Note that the Cas13a spacers | 5D |
| tiling | TATCTTGCTTTG (SEQ ID | | are truncated by two | |
| guide 13 | NO: 340) | | nucleotides at the 5′ end | |
| Cluc | GGTAAGAGTCAACATTCC | 1066 | Note that the Cas13a spacers | 5D |
| tiling | TGTGTGAAACCT (SEQ ID | | are truncated by two | |
| guide 14 | NO: 341) | | nucleotides at the 5′ end | |
| Cluc | GACCAGAATCTGTTTTCC | 1143 | Note that the Cas13a spacers | 5D |
| tiling | ATCAACAATGAG (SEQ ID | | are truncated by two | |
| guide 15 | NO: 342) | | nucleotides at the 5′ end | |
| Cluc | GATGGCTGTAGTCAGTAT | 1227 | Note that the Cas13a spacers | 5D |
| tiling | GTCACCATCTTG (SEQ ID | | are truncated by two | |
| guide 16 | NO: 343) | | nucleotides at the 5′ end | |
| Cluc | GTACCATCGAATGGATCT | 1304 | Note that the Cas13a spacers | 5D |
| tiling | CTAATATGTACG (SEQ ID | | are truncated by two | |
| guide 17 | NO: 344) | | nucleotides at the 5′ end | |
| Cluc | GAGATCACAGGCTCCTTC | 1380 | Note that the Cas13a spacers | 5D |
| tiling | AGCATCAAAAGA (SEQ ID | | are truncated by two | |
| guide 18 | NO: 345) | | nucleotides at the 5′ end | |
| Cluc | GCTTTGACCGGCGAAGAG | 1461 | Note that the Cas13a spacers | 5D |
| tiling | ACTATTGCAGAG (SEQ ID | | are truncated by two | |
| guide 19 | NO: 346) | | nucleotides at the 5′ end | |
| Cluc | GCCCCTCAGGCAATACTC | 1539 | Note that the Cas13a spacers | 5D |
| tiling | GTACATGCATCG (SEQ ID | | are truncated by two | |
| guide 20 | NO: 347) | | nucleotides at the 5′ end | |
| Cluc | GCTGGTACTTCTAGGGTG | 1619 | Note that the Cas13a spacers | 5D |
| tiling | TCTCCATGCTTT (SEQ ID | | are truncated by two | |
| guide 21 | NO: 348) | | nucleotides at the 5′ end | |
| Non- | GGTAATGCCTGGCTTGTC | N/A | Note that the Cas13a spacers | 5D |
| targeting | GACGCATAGTCTG (SEQ | | are truncated by two | |
| guide 1 | ID NO: 349) | | nucleotides at the 5′ end | |
| Non- | GGGAACCTTGGCCGTTAT | N/A | Note that the Cas13a spacers | 5D |
| targeting | AAAGTCTGACCAG (SEQ | | are truncated by two | |
| guide 2 | ID NO: 350) | | nucleotides at the 5′ end | |
| Non- | GGAGGGTGAGAATTTAG | N/A | Note that the Cas13a spacers | 5D |
| targeting | AACCAAGATTGTTG (SEQ | | are truncated by two | |
| guide 3 | ID NO: 351) | | nucleotides at the 5′ end | |

TABLE 12
Guide sequences used in this study for RNA editing in mammalian cells.
Mismatched base flips are capitalized

| | | | First |
|---|---|---|---|
| Name | Spacer sequence | Notes | FIG. |
| Tiling 30 nt 30 | gCatcctgeggcctctactctgcattcaatt | Has a 5′ G for U6 expression | 6C |
| mismatch distance | (SEQ ID NO: 352) | | |
| Tiling 30 nt 28 | gacCatcctgeggcctctactctgcattcaa | Has a 5′ G for U6 expression | 6C |
| mismatch distance | (SEQ ID NO: 353) | | |
| Tiling 30 nt 26 | gaaacCatcctgcggcctctactctgcattc | Has a 5′ G for U6 expression | 6C |
| mismatch distance | (SEQ ID NO: 354) | | |
| Tiling 30 nt 24 | gctaaacCatcctgcggcctctactctgcat | Has a 5′ G for U6 expression | 6C |
| mismatch distance | (SEQ ID NO: 355) | | |
| Tiling 30 nt 22 | gttctaaacCatcctgcggcctctactctgc | Has a 5′ G for U6 expression | 6C |
| mismatch distance | (SEQ ID NO: 356) | | |
| Tiling 30 nt 20 | gtgttctaaacCatcctgcggcctctactct | Has a 5′ G for U6 expression | 6C |
| mismatch distance | (SEQ ID NO: 357) | | |
| Tiling 30 nt 18 | gaatgttctaaacCatcctgcggcctctact | Has a 5′ G for U6 expression | 6C |
| mismatch distance | (SEQ ID NO: 358) | | |
| Tiling 30 nt 16 | gagaatgttctaaacCatcctgcggcctcta | Has a 5′ G for U6 expression | 6C |
| mismatch distance | (SEQ ID NO: 359) | | |
| Tiling 30 nt 14 | gatagaatgttctaaacCatcctgcggcctc | Has a 5′ G for U6 expression | 6C |
| mismatch distance | (SEQ ID NO: 360) | | |
| Tiling 30 nt 12 | gccatagaatgttctaaacCatcctgcggcc | Has a 5′ G for U6 expression | 6C |
| mismatch distance | (SEQ ID NO: 361) | | |
| Tiling 30 nt 10 | gttccatagaatgttctaaacCatcctgcgg | Has a 5′ G for U6 expression | 6C |
| mismatch distance | (SEQ ID NO: 362) | | |
| Tiling 30 nt 8 | gctaccatagaatgttctaaacCatcctgc | Has a 5′ G for U6 expression | 6C |
| mismatch distance | (SEQ ID NO: 363) | | |
| Tiling 30 nt 6 | gctctaccatagaatgttctaaacCatcct | Has a 5′ G for U6 expression | 6C |
| mismatch distance | (SEQ ID NO: 364) | | |
| Tiling 30 nt 4 | gatctctaccatagaatgttctaaacCatc | Has a 5′ G for U6 expression | 6C |
| mismatch distance | (SEQ ID NO: 365) | | |
| Tiling 30 nt 2 | ggaatctctaccatagaatgttctaaacCa | Has a 5′ G for U6 expression | 6C |
| mismatch distance | (SEQ ID NO: 366) | | |
| Tiling 50 nt 50 | gCatcctgcggcctctactctgcattcaatt | Has a 5′ G for U6 expression | 6C |
| mismatch distance | acatactgacacattcggca(SEQ ID NO: | | |
| | 367) | | |
| Tiling 50 nt 48 | gacCatcctgcggcctctactctgcattcaa | Has a 5′ G for U6 expression | 6C |
| mismatch distance | ttacatactgacacattcgg(SEQ ID NO: | | |
| | 368) | | |
| Tiling 50 nt 46 | gaaacCatcctgcggcctctactctgcattc | Has a 5′ G for U6 expression | 6C |
| mismatch distance | aattacatactgacacattc(SEQ ID NO: | | |
| | 369) | | |
| Tiling 50 nt 44 | gctaaacCatcctgcggcctctactctgcat | Has a 5′ G for U6 expression | 6C |
| mismatch distance | tcaattacatactgacacat(SEQ ID NO: | | |
| | 370) | | |
| Tiling 50 nt 42 | gttctaaacCatcctgcggcctctactctgc | Has a 5′ G for U6 expression | 6C |
| mismatch distance | attcaattacatactgacac(SEQ ID NO: | | |
| | 371) | | |
| Tiling 50 nt 40 | gtgttctaaacCatcctgcggcctctactct | Has a 5′ G for U6 expression | 6C |
| mismatch distance | gcattcaattacatactgac(SEQ ID NO: | | |
| | 372) | | |
| Tiling 50 nt 38 | gaatgttctaaacCatcctgcggcctctact | Has a 5′ G for U6 expression | 6C |
| mismatch distance | ctgcattcaattacatactg(SEQ ID NO: | | |
| | 373) | | |
| Tiling 50 nt 36 | gagaatgttctaaacCatcctgcggcctcta | Has a 5′ G for U6 expression | 6C |
| mismatch distance | ctctgcattcaattacatac(SEQ ID NO: | | |
| | 374) | | |
| Tiling 50 nt 34 | gatagaatgttctaaacCatcctgcggcctc | Has a 5′ G for U6 expression | 6C |
| mismatch distance | tactctgcattcaattacat(SEQ ID NO: | | |
| | 375) | | |
| Tiling 50 nt 32 | gccatagaatgttctaaacCatcctgcggcc | Has a 5′ G for U6 expression | 6C |
| mismatch distance | tctactctgcattcaattac(SEQ ID NO: | | |
| | 376) | | |
| Tiling 50 nt 30 | gttccatagaatgttctaaacCatcctgcgg | Has a 5′ G for U6 expression | 6C |
| mismatch distance | cctctactctgcattcaatt(SEQ ID NO: | | |
| | 377) | | |
| Tiling 50 nt 28 | gctaccatagaatgttctaaacCatcctgcg | Has a 5′ G for U6 expression | 6C |
| mismatch distance | gcctctactctgcattcaa(SEQ ID NO: | | |
| | 378) | | |
| Tiling 50 nt 26 | gctctaccatagaatgttctaaacCatcctg | Has a 5′ G for U6 expression | 6C |
| mismatch distance | cggcctctactctgcattc(SEQ ID NO: | | |
| | 379) | | |
| Tiling 50 nt 24 | gatctctaccatagaatgttctaaacCatcc | Has a 5′ G for U6 expression | 6C |
| mismatch distance | tgcggcctctactctgcat(SEQ ID NO: | | |
| | 380) | | |
| Tiling 50 nt 22 | ggaatctctaccatagaatgttctaaacCat | Has a 5′ G for U6 expression | 6C |
| mismatch distance | cctgcggcctctactctgc(SEQ ID NO: | | |
| | 381) | | |
| Tiling 50 nt 20 | gtggaatctctaccatagaatgttctaaacC | Has a 5′ G for U6 expression | 6C |
| mismatch distance | atcctgcggcctctactct(SEQ ID NO: | | |
| | 382) | | |
| Tiling 50 nt 18 | gactggaatctctaccatagaatgttctaaa | Has a 5′ G for U6 expression | 6C |
| mismatch distance | cCatcctgcggcctctact(SEQ ID NO: | | |
| | 383) | | |
| Tiling 50 nt 16 | ggaactggaatctctaccatagaatgttcta | Has a 5′ G for U6 expression | 6C |
| mismatch distance | aacCatcctgcggcctcta(SEQ ID NO: | | |
| | 384) | | |
| Tiling 50 nt 14 | gtggaactggaatctctttccatagaatgtt | Has a 5′ G for U6 expression | 6C |
| mismatch distance | ctaaacCatcctgcggcctc(SEQ ID NO; | | |
| | 385) | | |
| Tiling 50 nt 12 | gcctggaactggaatctctttccatagaatg | Has a 5′ G for U6 expression | 6C |
| mismatch distance | ttctaaacCatcctgcggcc(SEQ ID NO: | | |
| | 386) | | |
| Tiling 50 nt 10 | gttcctggaactggaatctctaccatagaat | Has a 5′ G for U6 expression | 6C |
| mismatch distance | gttctaaacCatcctgcgg(SEQ ID NO: | | |
| | 387) | | |
| Tiling 50 nt 8 | gggttcctggaactggaatctctttccatag | Has a 5′ G for U6 expression | 6C |
| mismatch distance | aatgttctaaacCatcctgc(SEQ ID NO: | | |
| | 388) | | |
| Tiling 50 nt 6 | gcaggttcctggaactggaatctctttccat | Has a 5′ G for U6 expression | 6C |
| mismatch distance | agaatgttctaaacCatcct(SEQ ID NO; | | |
| | 389) | | |
| Tiling 50 nt 4 | gaccaggttcctggaactggaatctctacca | Has a 5′ G for U6 expression | 6C |
| mismatch distance | tagaatgttctaaacCatc(SEQ ID NO: | | |
| | 390) | | |
| Tiling 50 nt 2 | ggtaccaggttcctggaactggaatctcttt | Has a 5′ G for U6 expression | 6C |
| mismatch distance | ccatagaatgttctaaacCa(SEQ ID NO: | | |
| | 391) | | |
| Tiling 70 nt 70 | gCatcctgcggcctctactctgcattcaatt | Has a 5′ G for U6 expression | 6C |
| mismatch distance | acatactgacacattcggcaacatgtttttc | | |
| | ctggtttat(SEQ ID NO: 392) | | |
| Tiling 70 nt 68 | gacCatcctgcggcctctactctgcattcaa | Has a 5′ G for U6 expression | 6C |
| mismatch distance | ttacatactgacacattcggcaacatgtttt | | |
| | tcctggttt(SEQ ID NO: 393) | | |
| Tiling 70 nt 66 | gaaacCatcctgcggcctctactctgcattc | Has a 5′ G for U6 expression | 6C |
| mismatch distance | aattacatactgacacattcggcaacatgtt | | |
| | tttcctggt(SEQ ID NO: 394) | | |
| Tiling 70 nt 64 | gctaaacCatcctgcggcctctactctgcat | Has a 5′ G for U6 expression | 6C |
| mismatch distance | tcaattacatactgacacattcggcaacatg | | |
| | tttttcctg(SEQ ID NO: 395) | | |
| Tiling 70 nt 62 | gttctaaacCatcctgcggcctctactctgc | Has a 5′ G for U6 expression | 6C |
| mismatch distance | attcaattacatactgacacattcggcaaca | | |
| | tgtttttcc(SEQ ID NO: 396) | | |
| Tiling 70 nt 60 | gtgttctaaacCatcctgcggcctctactct | Has a 5′ G for U6 expression | 6C |
| mismatch distance | gcattcaattacatactgacacattcggcaa | | |
| | catgttttt(SEQ ID NO: 397) | | |
| Tiling 70 nt 58 | gaatgttctaaacCatcctgcggcctctact | Has a 5′ G for U6 expression | 6C |
| mismatch distance | ctgcattcaattacatactgacacattcggc | | |
| | aacatgttt(SEQ ID NO: 398) | | |
| Tiling 70 nt 56 | gagaatgttctaaacCatcctgcggcctcta | Has a 5′ G for U6 expression | 6C |
| mismatch distance | ctctgcattcaattacatactgacacattcg | | |
| | gcaacatgt(SEQ ID NO: 399) | | |
| Tiling 70 nt 54 | gatagaatgttctaaacCatcctgcggcctc | Has a 5′ G for U6 expression | 6C |
| mismatch distance | tactctgcattcaattacatactgacacatt | | |
| | cggcaacat(SEQ ID NO: 400) | | |
| Tiling 70 nt 52 | gccatagaatgttctaaacCatcctgcggcc | Has a 5′ G for U6 expression | 6C |
| mismatch distance | tctactctgcattcaattacatactgacaca | | |
| | ttcggcaac(SEQ ID NO: 401) | | |
| Tiling 70 nt 50 | gttccatagaatgttctaaacCatcctgcgg | Has a 5′ G for U6 expression | 6C |
| mismatch distance | cctctactctgcattcaattacatactgaca | | |
| | cattcggca(SEQ ID NO: 402) | | |
| Tiling 70 nt 48 | gctaccatagaatgttctaaacCatcctgcg | Has a 5′ G for U6 expression | 6C |
| mismatch distance | gcctctactctgcattcaattacatactgac | | |
| | acattcgg(SEQ ID NO: 403) | | |
| Tiling 70 nt 46 | gctctaccatagaatgttctaaacCatcctg | Has a 5′ G for U6 expression | 6C |
| mismatch distance | cggcctctactctgcattcaattacatactg | | |
| | acacattc(SEQ ID NO: 404) | | |
| Tiling 70 nt 44 | gatctctaccatagaatgttctaaacCatcc | Has a 5′ G for U6 expression | 6C |
| mismatch distance | tgcggcctctactctgcattcaattacatac | | |
| | tgacacat(SEQ ID NO: 405) | | |
| Tiling 70 nt 42 | ggaatctctaccatagaatgttctaaacCat | Has a 5′ G for U6 expression | 6C |
| mismatch distance | cctgcggcctctactctgcattcaattacat | | |
| | actgacac(SEQ ID NO: 406) | | |
| Tiling 70 nt 40 | gtggaatctctaccatagaatgttctaaacC | Has a 5′ G for U6 expression | 6C |
| mismatch distance | atcctgcggcctctactctgcattcaattac | | |
| | atactgac(SEQ ID NO: 407) | | |
| Tiling 70 nt 38 | gactggaatctctaccatagaatgttctaaa | Has a 5′ G for U6 expression | 6C |
| mismatch distance | cCatcctgcggcctctactctgcattcaatt | | |
| | acatactg(SEQ ID NO: 408) | | |
| Tiling 70 nt 36 | ggaactggaatctctaccatagaatgttcta | Has a 5′ G for U6 expression | 6C |
| mismatch distance | aacCatcctgcggcctctactctgcattcaa | | |
| | ttacatac(SEQ ID NO: 409) | | |
| Tiling 70 nt 34 | gtggaactggaatctctttccatagaatgtt | Has a 5′ G for U6 expression | 6C |
| mismatch distance | ctaaacCatcctgcggcctctactctgcatt | | |
| | caattacat(SEQ ID NO: 410) | | |
| Tiling 70 nt 32 | gcctggaactggaatctctttccatagaatg | Has a 5′ G for U6 expression | 6C |
| mismatch distance | ttctaaacCatcctgcggcctctactctgca | | |
| | ttcaattac(SEQ ID NO: 411) | | |
| Tiling 70 nt 30 | gttcctggaactggaatctattccatagaat | Has a 5′ G for U6 expression | 6C |
| mismatch distance | gttctaaacCatcctgcggcctctactctgc | | |
| | attcaaft(SEQ ID NO: 412) | | |
| Tiling 70 nt 28 | gggttcctggaactggaatctctttccatag | Has a 5′ G for U6 expression | 6C |
| mismatch distance | aatgttctaaacCatcctgcggcctctactc | | |
| | tgcattcaa(SEQ ID NO: 413) | | |
| Tiling 70 nt 26 | gcaggttcctggaactggaatctctttccat | Has a 5′ G for U6 expression | 6C |
| mismatch distance | agaatgttctaaacCatcctgcggcctctac | | |
| | tctgcattc(SEQ ID NO: 414) | | |
| Tiling 70 nt 24 | gaccaggttcctggaactggaatctctttcc | Has a 5′ G for U6 expression | 6C |
| mismatch distance | atagaatgttctaaacCatcctgcggcctct | | |
| | actctgcat(SEQ ID NO: 415) | | |
| Tiling 70 nt 22 | ggtaccaggttcctggaactggaatctcttt | Has a 5′ G for U6 expression | 6C |
| mismatch distance | ccatagaatgttctaaacCatcctgcggcct | | |
| | ctactctgc(SEQ ID NO: 416) | | |
| Tiling 70 nt 20 | gatgtaccaggttcctggaactggaatctat | Has a 5′ G for U6 expression | 6C |
| mismatch distance | tccatagaatgttctaaacCatcctgcggcc | | |
| | tctactct(SEQ ID NO: 417) | | |
| Tiling 70 nt 18 | ggtatgtaccaggttcctggaactggaatct | Has a 5′ G for U6 expression | 6C |
| mismatch distance | ctttccatagaatgttctaaacCatcctgcg | | |
| | gcctctact(SEQ ID NO: 418) | | |
| Tiling 70 nt 16 | gacgtatgtaccaggttcctggaactggaat | Has a 5′ G for U6 expression | 6C |
| mismatch distance | ctctttccatagaatgttctaaacCatcctg | | |
| | cggcctcta(SEQ ID NO: 419) | | |
| Tiling 70 nt 14 | gacacgtatgtaccaggttcctggaactgga | Has a 5′ G for U6 expression | 6C |
| mismatch distance | atctattccatagaatgttctaaacCatcct | | |
| | gcggcctc(SEQ ID NO: 420) | | |
| Tiling 70 nt 12 | gcaacacgtatgtaccaggttcctggaactg | Has a 5′ G for U6 expression | 6C |
| mismatch distance | gaatctctttccatagaatgttctaaacCat | | |
| | cctgcggcc(SEQ ID NO: 421) | | |
| Tiling 70 nt 10 | gcccaacacgtatgtaccaggttcctggaac | Has a 5′ G for U6 expression | 6C |
| mismatch distance | tggaatctctttccatagaatgttctaaacC | | |
| | atcctgcgg(SEQ ID NO: 422) | | |
| Tiling 70 nt 8 | ggacccaacacgtatgtaccaggttcctgga | Has a 5′ G for U6 expression | 6C |
| mismatch distance | actggaatctctttccatagaatgttctaaa | | |
| | cCatcctgc(SEQ ID NO: 423) | | |
| Tiling 70 nt 6 | gttgacccaacacgtatgtaccaggttcctg | Has a 5′ G for U6 expression | 6C |
| mismatch distance | gaactggaatctctttccatagaatgttcta | | |
| | aacCatcct(SEQ ID NO: 424) | | |
| Tiling 70 nt 4 | gccttgacccaacacgtatgtaccaggttcc | Has a 5′ G for U6 expression | 6C |
| mismatch distance | tggaactggaatctctttccatagaatgttc | | |
| | taaacCatc(SEQ ID NO: 425) | | |
| Tiling 70 nt 2 | gttccttgacccaacacgtatgtaccaggtt | Has a 5′ G for U6 expression | 6C |
| mismatch distance | cctggaactggaatctctttccatagaatgt | | |
| | tctaaacCa(SEQ ID NO: 426) | | |
| Tiling 84 nt 84 | gCatcctgcggcctctactctgcattcaatt | Has a 5′ G for U6 expression | 6C |
| mismatch distance | acatactgacacattcggcaacatgtttttc | | |
| | ctggtttattttcacacagtcca(SEQ ID | | |
| | NO: 427) | | |
| Tiling 84 nt 82 | gacCatcctgcggcctctactctgcattcaa | Has a 5′ G for U6 expression | 6C |
| mismatch distance | ttacatactgacacattcggcaacatgtttt | | |
| | tcctggtttattttcacacagtc(SEQ ID | | |
| | NO: 428) | | |
| Tiling 84 nt 80 | gaaacCatcctgcggcctctactctgcattc | Has a 5′ G for U6 expression | 6C |
| mismatch distance | aattacatactgacacattcggcaacatgcc | | |
| | tggtttattttcacacag(SEQ ID NO: | | |
| | 429) | | |
| Tiling 84 nt 78 | gctaaacCatcctgcggcctctactctgcat | Has a 5′ G for U6 expression | 6C |
| mismatch distance | tcaattacatactgacacattcggcaacatg | | |
| | tttttcctggtttattttcacac(SEQ ID | | |
| | NO: 430) | | |
| Tiling 84 nt 76 | gttctaaacCatcctgcggcctctactctgc | Has a 5′ G for U6 expression | 6C |
| mismatch distance | attcaattacatactgacacattcggcaaca | | |
| | tgtttttcctggtttattttcac(SEQ ID | | |
| | NO: 431) | | |
| Tiling 84 nt 74 | gtgttctaaacCatcctgcggcctctactct | Has a 5′ G for U6 expression | 6C |
| mismatch distance | gcattcaattacatactgacacattcggcaa | | |
| | catgtttttcctggtttattttc(SEQ ID | | |
| | NO: 432) | | |
| Tiling 84 nt 72 | gaatgttctaaacCatcctgcggcctctact | Has a 5′ G for U6 expression | 6C |
| mismatch distance | ctgcattcaattacatactgacacattcggc | | |
| | aacatgtttttcctggtttattt(SEQ ID | | |
| | NO: 433) | | |
| Tiling 84 nt 70 | gagaatgttctaaacCatcctgcggcctcta | Has a 5′ G for U6 expression | 6C |
| mismatch distance | ctctgcattcaattacatactgacacattcg | | |
| | gcaacatgtttttcctggtttat(SEQ ID | | |
| | NO: 434) | | |
| Tiling 84 nt 68 | gatagaatgttctaaacCatcctgcggcctc | Has a 5′ G for U6 expression | 6C |
| mismatch distance | tactctgcattcaattacatactgacacatt | | |
| | cggcaacatgtttttcctggttt(SEQ ID | | |
| | NO: 435) | | |
| Tiling 84 nt 66 | gccatagaatgttctaaacCatcctgcggcc | Has a 5′ G for U6 expression | 6C |
| mismatch distance | tctactctgcattcaattacatactgacaca | | |
| | ttcggcaacatgtttttcctggt(SEQ ID | | |
| | NO: 436) | | |
| Tiling 84 nt 64 | gttccatagaatgttctaaacCatcctgcgg | Has a 5′ G for U6 expression | 6C |
| mismatch distance | cctctactctgcattcaattacatactgaca | | |
| | cattcggcaacatgtttttcctg(SEQ ID | | |
| | NO: 437) | | |
| Tiling 84 nt 62 | gctttccatagaatgttctaaacCatcctgc | Has a 5′ G for U6 expression | 6C |
| mismatch distance | ggcctctactctgcattcaattacatactga | | |
| | cacattcggcaacatgtttttcc(SEQ ID | | |
| | NO: 438) | | |
| Tiling 84 nt 60 | gctctttccatagaatgttctaaacCatcct | Has a 5′ G for U6 expression | 6C |
| mismatch distance | gcggcctctactctgcattcaattacatact | | |
| | gacacattcggcaacatgttttt(SEQ ID | | |
| | NO: 439) | | |
| Tiling 84 nt 58 | gatctctttccatagaatgttctaaacCatc | Has a 5′ G for U6 expression | 6C |
| mismatch distance | ctgcggcctctactctgcattcaattacata | | |
| | ctgacacattcggcaacatgttt(SEQ ID | | |
| | NO: 440) | | |
| Tiling 84 nt 56 | ggaatctattccatagaatgttctaaacCat | Has a 5′ G for U6 expression | 6C |
| mismatch distance | cctgcggcctctactctgcattcaattacat | | |
| | actgacacattcggcaacatgt(SEQ ID | | |
| | NO: 441) | | |
| Tiling 84 nt 54 | gtggaatctctttccatagaatgttctaaac | Has a 5′ G for U6 expression | 6C |
| mismatch distance | Catcctgcggcctctactctgcattcaatta | | |
| | catactgacacattcggcaacat(SEQ ID | | |
| | NO: 442) | | |
| Tiling 84 nt 52 | gactggaatctctaccatagaatgttctaaa | Has a 5′ G for U6 expression | 6C |
| mismatch distance | cCatcctgcggcctctactctgcattcaatt | | |
| | acatactgacacattcggcaac(SEQ ID | | |
| | NO: 443) | | |
| Tiling 84 nt 50 | ggaactggaatctctaccatagaatgttcta | Has a 5′ G for U6 expression | 6C |
| mismatch distance | aacCatcctgcggcctctactctgcattcaa | | |
| | ttacatactgacacattcggca(SEQ ID | | |
| | NO: 444) | | |
| Tiling 84 nt 48 | | Has a 5′ G for U6 expression | 6C |
| mismatch distance | gtggaactggaatctctttccatagaatgtt | | |
| | ctaaacCatcctgcggcctctactctgcatt | | |
| | caattacatactgacacattcgg(SEQ ID | | |
| | NO: 445) | | |
| Tiling 84 nt 46 | gcctggaactggaatctctttccatagaatg | Has a 5′ G for U6 expression | 6C |
| mismatch distance | ttctaaacCatcctgcggcctctactctgca | | |
| | ttcaattacatactgacacattc(SEQ ID | | |
| | NO: 446) | | |
| Tiling 84 nt 44 | gttcctggaactggaatctctaccatagaat | Has a 5′ G for U6 expression | 6C |
| mismatch distance | gttctaaacCatcctgcggcctctactctgc | | |
| | attcaattacatactgacacat(SEQ ID | | |
| | NO: 447) | | |
| Tiling 84 nt 42 | gggttcctggaactggaatctctttccatag | Has a 5′ G for U6 expression | 6C |
| mismatch distance | aatgttctaaacCatcctgcggcctctactc | | |
| | tgcattcaattacatactgacac(SEQ ID | | |
| | NO: 448) | | |
| Tiling 84 nt 40 | gcaggttcctggaactggaatctctttccat | Has a 5′ G for U6 expression | 6C |
| mismatch distance | agaatgttctaaacCatcctgcggcctctac | | |
| | tctgcattcaattacatactgac(SEQ ID | | |
| | NO: 449) | | |
| Tiling 84 nt 38 | gaccaggttcctggaactggaatctctacca | Has a 5′ G for U6 expression | 6C |
| mismatch distance | tagaatgttctaaacCatcctgcggcctcta | | |
| | ctctgcattcaattacatactg(SEQ ID | | |
| | NO: 450) | | |
| Tiling 84 nt 36 | ggtaccaggttcctggaactggaatctcttt | Has a 5′ G for U6 expression | 6C |
| mismatch distance | ccatagaatgttctaaacCatcctgcggcct | | |
| | ctactctgcattcaattacatac(SEQ ID | | |
| | NO: 451) | | |
| Tiling 84 nt 34 | gatgtaccaggttcctggaactggaatctct | Has a 5′ G for U6 expression | 6C |
| mismatch distance | accatagaatgttctaaacCatcctgcggcc | | |
| | tctactctgcattcaattacat(SEQ ID | | |
| | NO: 452) | | |
| Tiling 84 nt 32 | ggtatgtaccaggttcctggaactggaatct | Has a 5′ G for U6 expression | 6C |
| mismatch distance | ctttccatagaatgttctaaacCatcctgcg | | |
| | gcctctactctgcattcaattac(SEQ ID | | |
| | NO: 453) | | |
| Tiling 84 nt 30 | gacgtatgtaccaggttcctggaactggaat | Has a 5′ G for U6 expression | 6C |
| mismatch distance | ctctaccatagaatgttctaaacCatcctgc | | |
| | ggcctctactctgcattcaatt(SEQ ID | | |
| | NO: 454) | | |
| Tiling 84 nt 28 | gacacgtatgtaccaggttcctggaactgga | Has a 5′ G for U6 expression | 6C |
| mismatch distance | atctctaccatagaatgttctaaacCatcct | | |
| | gcggcctctactctgcattcaa(SEQ ID | | |
| | NO: 455) | | |
| Tiling 84 nt 26 | gcaacacgtatgtaccaggttcctggaactg | Has a 5′ G for U6 expression | 6C |
| mismatch distance | gaatctctttccatagaatgttctaaacCat | | |
| | cctgcggcctctactctgcattc(SEQ ID | | |
| | NO: 456) | | |
| Tiling 84 nt 24 | gcccaacacgtatgtaccaggttcctggaac | Has a 5′ G for U6 expression | 6C |
| mismatch distance | tggaatctattccatagaatgttctaaacCa | | |
| | tcctgcggcctctactctgcat(SEQ ID | | |
| | NO: 457) | | |
| Tiling 84 nt 22 | ggacccaacacgtatgtaccaggttcctgga | Has a 5′ G for U6 expression | 6C |
| mismatch distance | actggaatctctttccatagaatgttctaaa | | |
| | cCatcctgcggcctctactctgc(SEQ ID | | |
| | NO: 458) | | |
| Tiling 84 nt 20 | gttgacccaacacgtatgtaccaggttcctg | Has a 5′ G for U6 expression | 6C |
| mismatch distance | gaactggaatctctttccatagaatgttcta | | |
| | aacCatcctgcggcctctactct(SEQ ID | | |
| | NO: 459) | | |
| Tiling 84 nt 18 | gccttgacccaacacgtatgtaccaggttcc | Has a 5′ G for U6 expression | 6C |
| mismatch distance | tggaactggaatctctttccatagaatgttc | | |
| | taaacCatcctgcggcctctact(SEQ ID | | |
| | NO: 460) | | |
| Tiling 84 nt 16 | gttccttgacccaacacgtatgtaccaggtt | Has a 5′ G for U6 expression | 6C |
| mismatch distance | cctggaactggaatctctttccatagaatgt | | |
| | tctaaacCatcctgcggcctcta(SEQ ID | | |
| | NO: 545) | | |
| Tiling 84 nt 14 | gggttccttgacccaacacgtatgtaccagg | Has a 5′ G for U6 expression | 6C |
| mismatch distance | ttcctggaactggaatctctttccatagaat | | |
| | gttctaaacCatcctgcggcctc(SEQ ID | | |
| | NO: 461) | | |
| Tiling 84 nt 12 | gttggttccttgacccaacacgtatgtacca | Has a 5′ G for U6 expression | 6C |
| mismatch distance | ggttcctggaactggaatctctttccataga | | |
| | atgttctaaacCatcctgcggcc(SEQ ID | | |
| | NO: 462) | | |
| Tiling 84 nt 10 | gccttggttccttgacccaacacgtatgtac | Has a 5′ G for U6 expression | 6C |
| mismatch distance | caggttcctggaactggaatctattccatag | | |
| | aatgttctaaacCatcctgcgg(SEQ ID | | |
| | NO: 463) | | |
| Tiling 84 nt 8 | ggcccttggttccttgacccaacacgtatgt | Has a 5′ G for U6 expression | 6C |
| mismatch distance | accaggttcctggaactggaatctattccat | | |
| | agaatgttctaaacCatcctgc(SEQ ID | | |
| | NO: 464) | | |
| Tiling 84 nt 6 | gccgccatggttccttgacccaacacgtatg | Has a 5′ G for U6 expression | 6C |
| mismatch distance | taccaggttcctggaactggaatctctttcc | | |
| | atagaatgttctaaacCatcct(SEQ ID | | |
| | NO: 465) | | |
| Tiling 84 nt 4 | gcgccgcccttggttccttgacccaacacgt | Has a 5′ G for U6 expression | 6C |
| mismatch distance | atgtaccaggttcctggaactggaatctctt | | |
| | tccatagaatgttctaaacCatc(SEQ ID | | |
| | NO: 466) | | |
| Tiling 84 nt 2 | ggtcgccgcccttggttccttgacccaacac | Has a 5′ G for U6 expression | 6C |
| mismatch distance | gtatgtaccaggttcctggaactggaatctc | | |
| | atttcctagaatgttctaaacCa(SEQ ID | | |
| | NO: 467) | | |
| ADAR non- | GTAATGCCTGGCTTGTCGACGCATAGTCTG | Has a 5′ G for U6 expression | 6C |
| targeting guide | (SEQ ID NO: 468) | | |
| PFS binding screen | gaaaacgcaggttcctcCagtttcgggagca | Has a 5′ G for U6 expression | 7B |
| guide for TAG | gcgcacgtctccctgtagtc(SEQ ID | | |
| motif | NO: 469) | | |
| PFS binding screen | gacgcaggttcctctagCttcgggagcagcg | Has a 5′ G for U6 expression | 7B |
| guide for AAC | cacgtctccctgtagtcaag(SEQ ID | | |
| motif | NO: 470) | | |
| PFS binding screen | GTAATGCCTGGCTTGTCGACGCATAGTCTG | Has a 5′ G for U6 expression | 7B |
| non-targeting | (SEQ ID NO: 471) | | |
| Motif preference | gatagaatgactaaacCatcctgcggcctct | Has a 5′ G for U6 expression | 7C |
| targeting guide | actctgcattcaattacat(SEQ ID | | |
| | NO: 472) | | |
| Motif preference | GTAATGCCTGGCTTGTCGACGCATAGTCTG | Has a 5′ G for U6 expression | 7C |
| non-targeting | (SEQ ID NO: 473) | | |
| guide | | | |
| PPIB tiling guide | gCaaggccacaaaattatccactgggaacag | Has a 5′ G for U6 expression | 13D |
| 50 mismatch | tctaccgaagagac(SEQ ID NO: | | |
| distance | 474) | | |
| PPIB tiling guide | gcctgtagcCaaggccacaaaattatccact | Has a 5′ G for U6 expression | 13D |
| 42 mismatch | gtttttggaacagtctacc(SEQ ID | | |
| dtstance | NO: 475) | | |
| PPIB tiling guide | gctactctcctgtagcCaaggccacaaaatt | Has a 5′ G for U6 expression | 13D |
| 34 mismatch | atccactgtttttggaaca(SEQ ID | | |
| distance | NO: 476) | | |
| PPIB tiling guide | ggccaaatcctactctcctgtagcCaaggcc | Has a 5′ G for U6 expression | 13D |
| 26 mismatch | acaaaattatccactgta(SEQ ID NO: | | |
| distance | 477) | | |
| PPIB tiling guide | gtttttgtagccaaatcctttctctcctgta | Has a 5′ G for U6 expression | 13D |
| 18 mismatch | gcCaaggccacaaaattatc(SEQ ID NO: | | |
| distance | 478) | | |
| PPIB tiling guide | gatagctgtattgtagccaaatcctactctc | Has a 5′ G for U6 expression | 13D |
| 10 mismatch | ctgtagcCaaggccaca(SEQ ID NO: | | |
| distance | 479) | | |
| PPIB tiling guide 2 | gacgatggaatttgctggtagccaaatcctt | Has a 5′ G for U6 expression | 13D |
| mismatch distance | tctctcctgtagcCa(SEQ ID NO: 480) | | |
| Targeting guide, | gatagaatgactaaacGatcctgcggcctct | Has a 5′ G for U6 expression | 13D |
| opposite base G | actctgcattcaattacat(SEQ ID NO: | | |
| | 481) | | |
| Targeting guide, | gatagaatgactaaacAatcctgcggcctct | Has a 5′ G for U6 expression | 13D |
| opposite base A | actctgcattcaattacat(SEQ ID NO: | | |
| | 482) | | |
| Targeting guide, | gatagaatgactaaacTatcctgcggcctct | Has a 5′ G for U6 expression | 13D |
| opposite base C | actctgcattcaattacat(SEQ ID NO: | | |
| | 483) | | |
| AVPR2 guide 37 | ggtcccacgcggccCacagctgcaccaggaa | Has a 5′ G for U6 expression | 8A |
| mismatch distance | gaagggtgcccagcacagca(SEQ ID NO: | | |
| | 484) | | |
| AVPR2 guide 35 | ggggtcccacgcggccCacagctgcaccagg | Has a 5′ G for U6 expression | 8A |
| mismatch distance | aagaagggtgcccagcacag(SEQ ID NO: | | |
| | 485) | | |
| AVPR2 guide 33 | gccgggtcccacgcggccCacagctgcacca | Has a 5′ G for U6 expression | 8A |
| mismatch distance | ggaagaagggtgcccagcac(SEQ ID NO: | | |
| | 486) | | |
| guide 37 | gggtgatgacatccCaggcgatcgtgtggcc | Has a 5′ G for U6 expression | 8B |
| mismatch distance | tccaggagcccagagcagga(SEQ ID NO: | | |
| | 487) | | |
| FANCC guide 35 | gagggtgatgacatccCaggcgatcgtgtgg | Has a 5′ G for U6 expression | 8B |
| mismatch distance | cctccaggagcccagagcag(SEQ ID NO: | | |
| | 488) | | |
| FANCC guide 32 | gatcagggtgatgacatccCaggcgatcgtg | Has a 5′ G for U6 expression | 8B |
| mismatch distance | tggcctccaggagcccagag(SEQ ID | | |
| | NO: 489) | | |
| Synthetic disease | ggtggctccattcactcCaatgctgagcact | Has a 5′ G for U6 expression | 8E |
| gene target IL2RG | tccacagagtgggttaaagc(SEQ ID NO: | | |
| | 490) | | |
| Synthetic disease | gtttctaatatagCcagactgatggactatt | Has a 5′ G for U6 expression | 8E |
| gene target F8 | ctcaattaataatgat(SEQ ID NO: | | |
| | 491) | | |
| Synthetic disease | gagatgttgctgtggatCcagtccacagcca | Has a 5′ G for U6 expression | 8E |
| gene target LDLR | gcccgtcgggggcctggatg(SEQ ID NO: | | |
| | 492) | | |
| Synthetic disease | gcaggccggcccagctgCcaggtgcacctgc | Has a 5′ G for U6 expression | 8E |
| gene target CBS | tcggagcatcgggccggatc(SEQ ID NO: | | |
| | 493) | | |
| Synthetic disease | gcaaagaacctctgggtCcaagggtagacca | Has a 5′ G for U6 expression | 8E |
| gene target HBB | ccagcagcctgcccagggcc(SEQ ID NO: | | |
| | 494) | | |
| Synthetic disease | gaagagaaacttagtttCcagggctttggta | Has a 5′ G for U6 expression | 8E |
| gene target | gagggcaaaggttgatagca(SEQ ID NO: | | |
| ALDOB | 495) | | |
| Synthetic disease | gtcagcctagtgcagagCcactggtagttgg | Has a 5′ G for U6 expression | 8E |
| gene target DMD | tggttagagtttcaagttcc(SEQ ID NO: | | |
| | 496) | | |
| Synthetic disease | ggctcattgtgaacaggCcagtaatgtccgg | Has a 5′ G for U6 expression | 8E |
| gene target | gatggggcggcataggcggg(SEQ ID NO: | | |
| SMAD4 | 497) | | |
| Synthetic disease | gtagctaaagaacttgaCcaagacatatcag | Has a 5′ G for U6 expression | 8E |
| gene target BRCA2 | gatccacctcagctcctaga(SEQ ID NO: | | |
| | 498) | | |
| Synthetic disease | ggggcattgttctgtgcCcagtcctgctggt | Has a 5′ G for U6 expression | 8E |
| gene target | agacctgctccccggtggct(SEQ ID NO: | | |
| GRIN2A | 499) | | |
| Synthetic disease | gagaagtcgttcatgtgCcaccgtgggagcg | Has a 5′ G for U6 expression | 8E |
| gene target SCN9A | tacagtcatcattgatcttg(SEQ ID NO: | | |
| | 500) | | |
| Synthetic disease | gggattaatgctgaacgCaccaaagttcatc | Has a 5′ G for U6 expression | 8E |
| gene target | ccaccacccatattactacc(SEQ ID NO: | | |
| TARDBP | 546) | | |
| Synthetic disease | gctccaaaggctttcctCcactgttgcaaag | Has a 5′ G for U6 expression | 8E |
| gene target CFTR | ttattgaatcccaagacaca(SEQ ID NO: | | |
| | 501) | | |
| Synthetic disease | gatgaatgaacgatttcCcagaactccctaa | Has a 5′ G for U6 expression | 8E |
| gene target UBE3A | tcagaacagagtccctggta(SEQ ID NO: | | |
| | 502) | | |
| Synthetic disease | ggagcctctgccggagcCcagagaacccgag | Has a 5′ G for U6 expression | 8E |
| gene target SMPD1 | agtcagacagagccagcgcc(SEQ ID NO: | | |
| | 503) | | |
| Synthetic disease | ggottccgtggagacacCcaatcaatttgaa | Has a 5′ G for U6 expression | 8E |
| gene target USH2A | gagatcttgaagtgatgcca(SEQ ID NO: | | |
| | 504) | | |
| Synthetic disease | gtgggactgccctcctcCcatttgcagatgc | Has a 5′ G for U6 expression | 8E |
| gene target MEN1 | cgtcgtagaatcgcagcagg(SEQ ID NO: | | |
| | 505) | | |
| Synthetic disease | gcttcttcaatagttctCcagctacactggc | Has a 5′ G for U6 expression | 8E |
| gene target | aggcatatgcccgtgttcct(SEQ ID NO: | | |
| C8orf37 | 506) | | |
| Synthetic disease | gattccttttcttcgtcCcaattcacctcag | Has a 5′ G for U6 expression | 8E |
| gene target MLH1 | tggctagtcgaagaatgaag(SEQ ID NO: | | |
| | 507) | | |
| Synthetic disease | gcagcttcagcaccttcCagtcagactcctg | Has a 5′ G for U6 expression | 8E |
| gene target TSC2 | cttcaagcactgcagcagga(SEQ ID NO: | | |
| | 508) | | |
| Synthetic disease | gccatttgcttgcagtgCcactccagaggat | Has a 5′ G for U6 expression | 8E |
| gene target NF1 | tccggattgccataaatact(SEQ ID NO: | | |
| | 509) | | |
| Synthetic disease | gttcaatagttaggtcCagtatcgtnacagc | Has a 5′ G for U6 expression | 8E |
| gene target MSH6 | ccttcttggtagatttca(SEQ ID NO: | | |
| | 510) | | |
| Synthetic disease | ggcaaccgtcttctgacCaaatggcagaaca | Has a 5′ G for U6 expression | 8E |
| gene target SMN1 | tttgtccccaactttccact(SEQ ID NO: | | |
| | 511) | | |
| Synthetic disease | gcgactttccaatgaacCactgaagcccagg | Has a 5′ G for U6 expression | 8E |
| gene target | tatgacaaagccgatgatct(SEQ ID NO: | | |
| SH3TC2 | 512) | | |
| Synthetic disease | gtttacactcatgcttcCacagctttaacag | Has a 5′ G for U6 expression | 8E |
| gene target | atcatttggttccttgatga(SEQ ID NO: | | |
| DNAH5 | 513) | | |
| Synthetic disease | gcttaagcttccgtgtcCagccttcaggcag | Has a 5′ G for U6 expression | 8E |
| gene target MECP2 | ggtggggtcatcatacatgg(SEQ ID NO: | | |
| | 514) | | |
| Synthetic disease | ggacagctgggctgatcCatgatgtcatcca | Has a 5′ G for U6 expression | 8E |
| gene target | gaaacactggggaccctcag(SEQ ID NO: | | |
| ADGRV1 | 515) | | |
| Synthetic disease | gtctcatctcaactttcCatatccgtatcat | Has a 5′ G for U6 expression | 8E |
| gene target AHI1 | ggaatcatagcatcctgtaa(SEQ ID NO: | | |
| | 516) | | |
| Synthetic disease | gcatgcagacgcggttcCactcgcagccaca | Has a 5′ G for U6 expression | 8E |
| gene target PRKN | gttccagcaccactcgagcc(SEQ ID NO: | | |
| | 517) | | |
| Synthetic disease | gttggttagggtcaaccCagtattctccact | Has a 5′ G for U6 expression | 8E |
| gene target | cttgagttcaggatggcaga(SEQ ID NO: | | |
| COL3A1 | 518) | | |
| Synthetic disease | gctacactgtccaacacCcactctcgggtca | Has a 5′ G for U6 expression | 8E |
| gene target BRCA1 | ccacaggtgcctcacacatc(SEQ ID NO: | | |
| | 519) | | |
| Synthetic disease | gctgcactgtgtaccccCagagctccgtgtt | Has a 5′ G for U6 expression | 8E |
| gene target | gccgacatcctggggtggct(SEQ ID NO: | | |
| MYBPC3 | 520) | | |
| Synthetic disease | gagcttcctgccactccCaacaggtttcaca | Has a 5′ G for U6 expression | 8E |
| gene target APC | gtaagcgcgtatctgttcca(SEQ ID NO: | | |
| | 521) | | |
| Synthetic disease | gacggcaagagcttaccCagtcacttgtgtg | Has a 5′ G for U6 expression | 8E |
| gene target BMPR2 | gagacttaaatacttgcata(SEQ ID NO: | | |
| | 522) | | |
| KRAS tiling guide | gCaaggccacaaaattatccactgggaacag | Has a 5′ G for U6 expression | 9A |
| 50 mismatch | tctaccgaagagac(SEQ ID NO: 523) | | |
| distance | | | |
| KRAS tiling guide | gcctgtagcCaaggccacaaaattatccact | Has a 5′ G for U6 expression | 9A |
| 42 mismatch | gtttttggaacagtctacc(SEQ ID NO: | | |
| distance | 524) | | |
| KRAS tiling guide | gctactctcctgtagcCaaggccacaaaatt | Has a 5′ G for U6 expression | 9A |
| 34 mismatch | atccactgtttttggaaca(SEQ ID NO: | | |
| distance | 525) | | |
| KRAS tiling guide | ggccaaatcctttctctcctgtagcCaaggc | Has a 5′ G for U6 expression | 9A |
| 26 mismatch | cacaaaattatccactgttt(SEQ ID NO: | | |
| distance | 526) | | |
| KRAS tiling guide | gtttttgtagccaaatcctttctctcctgta | Has a 5′ G for U6 expression | 9A |
| 18 mismatch | gcCaaggccacaaaattatc(SEQ ID NO: | | |
| distance | 527) | | |
| KRAS tiling guide | gatttgctgttatgtagccaaatcctactct | Has a 5′ G for U6 expression | 9A |
| 10 mismatch | cctgtagcCaaggccaca(SEQ ID NO: | | |
| distance | 528) | | |
| KRAS tiling guide | gacgatggaatttgctggtagccaaatcctt | Has a 5′ G for U6 expression | 9A |
| 2 mismatch | tctctcctgtagcCa(SEQ ID NO: 529) | | |
| distance | | | |
| KRAS tiling non- | GTAATGCCTGGCTTGTCGACGCATAGTCTG | Has a 5′ G for U6 expression | 9A |
| targeting guide | (SEQ ID NO: 530) | | |
| Luciferase W85X | gatagaatgttctaaacCatcctgcggcctc | Has a 5′ G for U6 expression | 53B |
| targeting guide | tactctgcattcaattacat(SEQ ID NO: | | |
| for | 531) | | |
| transcriptome | | | |
| specificity | | | |
| Non-targeting | GCAGGGTTTTCCCAGTCACGACGTTGTAAAG | Has a 5′ G for U6 expression | 9C |
| guide for | TTG(SEQ ID NO: 532) | | |
| transcriptome | | | |
| specificity | | | |
| endogenous KRAS | gtcaaggcactcttgccCacgccaccagctc | Has a 5′ G for U6 expression | 10F |
| guide 2 | caactaccacaagtttatat(SEQ ID NO: | | |
| | 533) | | |
| endogenous PPIB | gcaaagatcacccggccCacatcttcatctc | Has a 5′ G for U6 expression | 10G |
| guide 1 | caattcgtaggtcaaaatac(SEQ ID NO: | | |
| | 534) | | |
| endogenous KRAS | GcgccaccagctccaacCaccacaagtttat | Has a 5′ G for U6 expression | 10F |
| guide 1 | attcagtcattttcagcagg(SEQ ID NO: | | |
| | 535) | | |
| endogenous KRAS | GtactccatcaattacCacttgcttcctgta | Has a 5′ G for U6 expression | 10F |
| guide 3 | ggaatcctctattGTtgga(SEQ ID NO: | | |
| | 536) | | |
| endogenous PPIB | GctactctcctgtagcCaaggccacaaaatt | Has a 5′ G for U6 expression | 10G |
| guide 2 | atccactgtttttggaaca(SEQ ID NO: | | |
| | 537) | | |
| endogenous non- | GTAATGCCTGGCTTGTCGACGCATAGTCTG | Has a 5′ G for U6 expression | 10F |
| targeting guide | (SEQ ID NO: 538) | | |
| BoxB Cluc guide | tctaccataGGCCCTGAAAAAGGGCCtgttc | Has a 5′ G for U6 expression | 18B |
| | taaacCatcctgcggcctctactcGGCCCTG | | |
| | AAAAAGGGCCattcaattac(SEQ ID NO: | | |
| | 539) | | |
| BoxB | cagctggcgaGGCCCTGAAAAAGGGCCgggg | Has a 5′ G for U6 expression | 18B |
| non-targeting | atgtgcCgcaaggcgattaagttggGGCCCT | | |
| guide | GAAAAAGGGCCacgccagggt(SEQ ID | | |
| | NO: 540) | | |
| Stafforst | GTGGAATAGTATAACAATATGCTAAATGTTG | Has a 5′ G for U6 expression | 18C |
| full length | TTATAGTATCCCACtctaaaCCAtcctgcgG | | |
| ADAR2 guide 1 | GGCCCTCTTCAGGGCCC(SEQ ID NO: | | |
| | 541) | | |
| Stafforst full | GTGGAATAGTATAACAATATGCTAAATGTTG | Has a 5′ G for U6 expression | 18C |
| length ADAR2 | TTATAGTATCCCACaccctggcgttacccaG | | |
| non-targeting | GGCCCTCTTCAGGGCCC(SEQ ID NO: | | |
| guide | 542) | | |

### REFERENCES

[0850] 1. P. D. Hsu, E. S. Lander, F. Zhang, Development and applications of CRISPR-Cas9 for genome engineering. Cell 157, 1262-1278 (2014).
[0851] 2. A. C. Komor, A. H. Badran, D. R. Liu, CRISPR-Based Technologies for the Manipulation of Eukaryotic Genomes. Cell 168, 20-36 (2017).
[0852] 3. L. Cong et al., Multiplex genome engineering using CRISPR/Cas systems. Science 339, 819-823 (2013).
[0853] 4. P. Mali et al., RNA-guided human genome engineering via Cas9. Science 339, 823-826 (2013).
[0854] 5. B. Zetsche et al., Cpf1 is a single RNA-guided endonuclease of a class 2 CRISPR-Cas system. Cell 163, 759-771 (2015).
[0855] 6. H. Kim, J. S. Kim, A guide to genome engineering with programmable nucleases. Nat Rev Genet 15, 321-334 (2014).
[0856] 7. A. C. Komor, Y. B. Kim, M. S. Packer, J. A. Zuris, D. R. Liu, Programmable editing of a target base in genomic DNA without double-stranded DNA cleavage. Nature 533, 420-424 (2016).
[0857] 8. K. Nishida et al., Targeted nucleotide editing using hybrid prokaryotic and vertebrate adaptive immune systems. Science 353, (2016).
[0858] 9. Y. B. Kim et al., Increasing the genome-targeting scope and precision of base editing with engineered Cas9-cytidine deaminase fusions. Nat Biotechnol 35, 371-376 (2017).
[0859] 10. O. O. Abudayyeh et al., C2c2 is a single-component programmable RNA-guided RNA-targeting CRISPR effector. Science 353, aaf5573 (2016).
[0860] 11. S. Shmakov et al., Discovery and Functional Characterization of Diverse Class 2 CRISPR-Cas Systems. Mol Cell 60, 385-397 (2015).
[0861] 12. S. Shmakov et al., Diversity and evolution of class 2 CRISPR-Cas systems. Nat Rev Microbiol 15, 169-182 (2017).
[0862] 13. A. A. Smargon et al., Cas13b Is a Type VI-B CRISPR-Associated RNA-Guided RNase Differentially Regulated by Accessory Proteins Csx27 and Csx28. Mol Cell 65, 618-630 e617 (2017).
[0863] 14. J. S. Gootenberg et al., Nucleic acid detection with CRISPR-Cas13a/C2c2. Science 356, 438-442 (2017).
[0864] 15. O. O. Abudayyeh et al., RNA targeting with CRISPR-Cas13a. Nature in press, (2017).
[0865] 16. K. Nishikura, Functions and regulation of RNA editing by ADAR deaminases. Annu Rev Biochem 79, 321-349 (2010).
[0866] 17. B. L. Bass, H. Weintraub, An unwinding activity that covalently modifies its double-stranded RNA substrate. Cell 55, 1089-1098 (1988).
[0867] 18. M. M. Matthews et al., Structures of human ADAR2 bound to dsRNA reveal base-flipping mechanism and basis for site selectivity. Nat Struct Mol Biol 23, 426-433 (2016).
[0868] 19. A. Kuttan, B. L. Bass, Mechanistic insights into editing-site specificity of ADARs. Proc Natl Acad Sci USA 109, E3295-3304 (2012).
[0869] 20. S. K. Wong, S. Sato, D. W. Lazinski, Substrate recognition by ADAR1 and ADAR2. RNA 7, 846-858 (2001).
[0870] 21. M. Fukuda et al., Construction of a guide-RNA for site-directed RNA mutagenesis utilising intracellular A-to-I RNA editing. Sci Rep 7, 41478 (2017).
[0871] 22. M. F. Montiel-Gonzalez, I. Vallecillo-Viejo, G. A. Yudowski, J. J. Rosenthal, Correction of mutations within the cystic fibrosis transmembrane conductance regulator by site-directed RNA editing. Proc Natl Acad Sci USA 110, 18285-18290 (2013).
[0872] 23. M. F. Montiel-Gonzalez, I. C. Vallecillo-Viejo, J. J. Rosenthal, An efficient system for selectively altering genetic information within mRNAs. Nucleic Acids Res 44, e157 (2016).
[0873] 24. J. Wettengel, P. Reautschnig, S. Geisler, P. J. Kahle, T. Stafforst, Harnessing human ADAR2 for RNA repair—Recoding a PINK1 mutation rescues mitophagy. Nucleic Acids Res 45, 2797-2808 (2017).
[0874] 25. Y. Wang, J. Havel, P. A. Beal, A Phenotypic Screen for Functional Mutants of Human Adenosine Deaminase Acting on RNA 1. ACS Chem Biol 10, 2512-2519 (2015).
[0875] 26. K. A. Lehmann, B. L. Bass, Double-stranded RNA adenosine deaminases ADAR1 and ADAR2 have overlapping specificities. Biochemistry 39, 12875-12884 (2000).
[0876] 27. Y. Zheng, C. Lorenzo, P. A. Beal, DNA editing in DNA/RNA hybrids by adenosine deaminases that act on RNA. Nucleic Acids Res 45, 3369-3377 (2017).
[0877] 28. K. Gao et al., A de novo loss-of-function GRIN2A mutation associated with childhood focal epilepsy and acquired epileptic aphasia. PLoS One 12, e0170818 (2017).
[0878] 29. H. M. Lanoiselee et al., APP, PSEN1, and PSEN2 mutations in early-onset Alzheimer disease: A genetic screening study of familial and sporadic cases. PLoS Med 14, e1002270 (2017).
[0879] 30. C. Ballatore, V. M. Lee, J. Q. Trojanowski, Tau-mediated neurodegeneration in Alzheimer's disease and related disorders. Nat Rev Neurosci 8, 663-672 (2007).
[0880] 31. Y. Li et al., Carriers of rare missense variants in IFIH1 are protected from psoriasis. J Invest Dermatol 130, 2768-2772 (2010).
[0881] 32. R. S. Finkel et al., Treatment of infantile-onset spinal muscular atrophy with nusinersen: a phase 2, open-label, dose-escalation study. Lancet 388, 3017-3026 (2016).

### Example 4—Additional Type VI-B Effectors

TABLE 13

| | |
|---|---|
| Paludibacter | mktsanniyfnginsfkkifdskgaiapiaekscrnfdikaqndvnkegrihyfavghtf |
| propionicigenes | kqldtenlfeyvldenlrakrptrfislqqfdkefienikrlisdirninshyihrfdpl |
| WB4 | kidavptniidflkesfelaviqiylkekginylqfsenphadqklvaflhdkflpldek |
| (NC_014734.1) | ktsmlqnetpqlkeykeyrkyfktlskqaaidqllfaeketdyiwnlfdshpvltisagk |
| >WP_013446107 | ylsfysclfllsmflykseangliskikgfkkntteeekskreiftffskrfnsmdidse |
| | enqlvkfrdlilylnhypvawnkdleldssnpamtdklkskiieleinrsfplyegnerf |
| | atfakyqiwgkkhlgksiekeyinasftdeeitaytyetdtcpelkdahkkladlkaakg |
| | lfgkrkeknesdikktetsirelqhepnpikdkliqrieknlltvsygrnqdrfmdfsar |
| | flaeinyfgqdasfkmyhfyatdeqnselekyelpkdkkkydslkfhqgklvhfisykeh |
| | lkryeswddafviennaiqlklsfdgventvtiqralliylledalrniqnntaenagkq |
| | llqeyyshnkadlsafkqiltqqdsiepqqktefkkllprrllnnyspainhlqtphssl |
| | plilekallaekrycslvvkakaegnyddfikrnkgkqfklqfirkawnlmyfrnsylqn |
| | vqaaghhksfhierdefndfsrymfafeelsqykyylnemfekkgffennefkilfqsgt |
| | slenlyektkqkfeiwlasntaktnkpdnyhlnnyeqqfsnqlffinlshfinylkstgk |
| | lqtdangqiiyealnnvqylipeyyytdkpersesksgnklynklkatkledallyemam |
| | cylkadkqiadkakhpitklltsdvefnitnkegiqlyhllvpfkkidafiglkmhkeqq |
| | dkkhptsflanivnylelvkndkdirktyeafstnpvkrtltyddlakidghlisksikf |
| | tnvtleleryfifkeslivkkgnnidfkyikglrnyynnekkknegirnkafhfgipdsk |
| | sydglirdaevmfianevkpthatkytdlnkqlhtvcdklmetvhndyfskegdgkkkre |
| | aagqkyfeniisak (SEQ ID NO: 547) |
| Prevotella | mnipalvenqkkyfgtysvmamlnaqtvldhiqkvadiegegnennenlwfhpvmshlyn |
| sp. P5-60 | akngydkqpektmfiierlqsyfpflkimaenqreysngkykqnrvevnsndifevlkra |
| (NZ_JXQJ01000080.1) | fgvlkmyrdltnhyktyeeklidgcefltsteqpfsgmiskyytvalrntkerygykaed |
| >WP_044074780.1 | lafiqdnrykftkdaygkrksqvntgsflslqdyngdttkklhlsgvgialliclfldkq |
| | yinlflsrlpifssynaqseerriiirsfginsikqpkdrihseksnksvamdmlnevkr |
| | cpdelfttlsaekqsrfriisddhnevlmkrssdrfvplllqyidygklfdhirfhvnmg |
| | klryllkadktcidgqtrvrvieqpingfgrleevetmrkqengtfgnsgirirdfenmk |
| | rddanpanypyivetythyilennkvemfisdeenptpllpvieddryvvktipscrmst |
| | leipamafhmflfgsektekliidvhdrykrlfqamqkeevtaeniasfgiaesdlpqki |
| | mdlisgnahgkdvdafirltvddmltdterrikrfkddrksirsadnkmgkrgfkgistg |
| | kladflakdivlfqpsvndgenkitglnyrimqsaiavydsgddyeakqqfklmfekarl |
| | igkgttephpflykvfvrsipanavdfyerylierkfyliglsneikkgnrvdvpfirrd |
| | qnkwktpamktlgriysedlpvelprqmfdneikshlkslpqmegidfnnanvtyliaey |
| | mkrvinddfqtfyqwkrnyrymdmlrgeydrkgslqhcftsieereglwkerasrteryr |
| | klasnkirsnrqmrnasseeietildkrlsncrneyqksekiirryrvqdallfllakkt |
| | lteladfdgerfklkeimpdaekgilseimpmsftfekggkiytitsggmklknygdffv |
| | lasdkrignllelvgsntvskedimeefkkydqcrpeissivfnlekwafdtypelpary |
| | drkekvdfwsildvlsnnkdinneqsyilrkirnafdhnnypdkgiveikalpeiamsik |
| | kafgeyaimk (SEQ ID NO: 548) |
| Prevotella | mnipalvenqkkyfgtysvmamlnaqtvldhiqkvadiegegnennenlwfhpvmshlyn |
| sp. P4-76 | akngydkqpektmfiierlqsyfpflkimaenqreysngkykqnrvevnsndifevlkra |
| (NZ_JXQ101000021.1) | fgvlkmyrdqashyktydeklidgcefltsteqplsgminnyytvalrnmnerygykted |
| >WP_044072147.1 | lafiqdkrfkfvkdaygkkksqvntgfflslqdyngdtqkklhlsgvgialliclfldkq |
| | yiniflsrlpifssynaqseerriiirsfginsikqpkdrihseksnksvamdmlneikr |
| | cpnelfetlsaekqsrfriisndhnevlmkrssdrfvplllqyidygklfdhirfhvnmg |
| | klryllkadktcidgqtrvrvieqpingfgrleevetmrkqengtfgnsgirirdfenmk |
| | rddanpanypyivdtythyilennkvemfisdeetpapllpvieddryvvktipscrmst |
| | leipamafhmflfgskkteklivdvhnrykrlfkamqkeevtaeniasfgiaesdlpqki |
| | idlisgnahgkdvdafirltvddmladterrikrfkddrksirsadnkmgkrgfkgistg |
| | kladflakdivlfqpsvndgenkitglnyrimqsaiavynsgddyeakqqfklmfekarl |
| | igkgttephpflykvfvrsipanavdfyerylierkfyliglsneikkgnrvdvpfirrd |
| | qnkwktpamktlgriydedlpvelprqmfdneikshlkslpqmegidfnnanvtyliaey |
| | mkrvinddfqtfyqwkrnyrymdmlrgeydrkgslqscftsveereglwkerasrteryr |
| | klasnkirsnrqmrnasseeietildkrlsnsrneyqksekvirryrvqdallfllakkt |
| | lteladfdgerfklkeimpdaekgilseimpmsftfekggkkytitsegmklknygdffv |
| | lasdkrignllelvgsdtvskedimeefkkydqcrpeissivfnlekwafdtypelsary |
| | dreekvdfksilkillnnkninkeqsdilrkirnafdhnnypdkgvveiralpeiamsik |
| | kafgeyaimk (SEQ ID NO: 549) |
| Prevotella | mnipalvenqkkyfgtysvmamlnaqtvldhiqkvadiegegnennenlwfhpvmshlyn |
| sp. P5-125 | akngydkqpektmfiierlqsyfpflkimaenqreysngkykqnrvevnsndifevlkra |
| (NZ_JXQL01000055.1) | fgvlkmyrdltnhyktyeeklndgcefltsteqplsgminnyytvalrnmnerygykted |
| >WP_044065294.1 | lafiqdkrfkfvkdaygkkksqvntgfflslqdyngdtqkklhlsgvgialliclfldkq |
| | yiniflsrlpifssynaqseerriiirsfginsiklpkdrihseksnksvamdmlnevkr |
| | cpdelfttlsaekqsrfriisddhnevlmkrssdrfvplllqyidygklfdhirfhvnmg |
| | klryllkadktcidgqtrvrvieqpingfgrleeaetmrkqengtfgnsgirirdfenmk |
| | rddanpanypyivdtythyilennkvemfindkedsapllpvieddryvvktipscrmst |
| | leipamafhmflfgskkteklivdvhnrykrlfqamqkeevtaeniasfgiaesdlpqki |
| | ldlisgnahgkdvdafirltvddmltdterrikrfkddrksirsadnkmgkrgfkgistg |
| | kladflakdivlfqpsvndgenkitglnyrimqsaiavydsgddyeakqqfklmfekarl |
| | igkgttephpflykvfarsipanavefyerylierkfyltglsneikkgnrvdvpfirrd |
| | qnkwktpamktlgriysedlpvelprqmfdneikshlkslpqmegidfnnanvtyliaey |
| | mkrvldddfqtfyqwnrnyrymdmlkgeydrkgslqhcftsveereglwkerasrteryr |
| | kgasnkirsnrqmrnasseeietildkrlsnsrneyqksekvirryrvqdallfllakkt |
| | lteladfdgerfklkeimpdaekgilseimpmsftfekggkkytitsegmklknygdffv |
| | lasdkrignllelvgsdivskedimeefnkydqcrpeissivfnlekwafdtypelsary |
| | dreekvdfksilkillnnkninkeqsdilrkirnafdhnnypdkgvveikalpeiamsik |
| | kafgeyaimk (SEQ ID NO: 550) |
| Prevotella | mnipalvenqkkyfgtysvmamlnaqtvldhiqkvadiegegnennenlwfhpvmshlyn |
| sp. P5-119 | akngydkqpektmfiierlqsyfpflkimaenqreysngkykqnrvevnsndifevlkra |
| (NZ_JXQK01000043.1) | fgvlkmyrdltnhyktyeeklidgcefltsteqplsgmiskyytvalrntkerygykted |
| >WP_042518169.1 | lafiqdnikkitkdaygkrksqvntgfflslqdyngdtqkklhlsgvgialliclfldkq |
| | yiniflsrlpifssynaqseerriiirsfginsiklpkdrihseksnksvamdmlnevkr |
| | cpdelfttlsaekqsrfriisddhnevlmkrstdrfvplllqyidygklfdhirfhvnmg |
| | klryllkadktcidgqtrvrvieqpingfgrleeaetmrkqengtfgnsgirirdfenvk |
| | rddanpanypyivdtythyilennkvemfisdkgssapllplieddryvvktipscrmst |
| | leipamafhmflfgskkteklivdvhnrykrlfqamqkeevtaeniasfgiaesdlpqki |
| | ldlisgnahgkdvdafirltvddmltdterrikrfkddrksirsadnkmgkrgfkgistg |
| | kladflakdivlfqpsvndgenkitglnyrimqsaiavydsgddyeakqqfklmfekarl |
| | igkgttephpflykvfarsipanavdfyerylierkfyltglcneikrgnrvdvpfirrd |
| | qnkwktpamktlgriysedlpvelprqmfdneikshlkslpqmegidfnnanvtyliaey |
| | mkrvinddfqtfyqwkrnyhymdmlkgeydrkgslqhcftsveereglwkerasrteryr |
| | klasnkirsnrqmrnasseeietildkrlsncrneyqksekvirryrvqdallfllakkt |
| | lteladfdgerfklkeimpdaekgilseimpmsftfekggkkytitsegmklknygdffv |
| | lasdkrignllelvgsdivskedimeefnkydqcrpeissivfnlekwafdtypelsary |
| | dreekvdfksilkillnnkninkeqsdilrkirnafdhnnypdkgiveikalpeiamsik |
| | kafgeyaimk (SEQ ID NO: 551) |
| Capnocytophaga | mkniqrlgkgnefspfkkedkfyfggflnlannniedffkeiitrfgivitdenkkpket |
| canimorsus Cc5 | fgekilneifkkdisivdyekwvnifadyfpftkylslyleemqfknrvicfrdvmkell |
| (NC_015846 | ktvealrnfythydhepikiedrvfyfldkvildvsltvknkylktdktkeflnqhigee |
| >WP_013997271A | lkelckqrkdylvgkgkridkeseiingiynnafkdfickrekqddkenhnsvekilcnk |
| | epqnkkqkssatvwelcskssskyteksfpnrendkhclevpisqkgivfllsfflnkge |
| | iyaltsnikgfkakitkeepvtydknsirymathrmfsflaykglkrkirtseinynedg |
| | qasstyeketlmlqmldelnkvpdvvyqnlsedvqktfiedwneylkenngdvgtmeeeq |
| | vihpvirkryedkfnyfairfldefaqfptlrfqvhlgnylcdkrtkqicdttterevkk |
| | kitvfgrlselenkkaiflnereeikgwevfpnpsydfpkenisvnykdfpivgsildre |
| | kqpvsnkigirvkiadelgreidkaikekklrnpknrkanqdekqkerlvneivstnsne |
| | qgepvvfigqptaylsmndihsvlyeflinkisgealetkivekietqikqiigkdattk |
| | ilkpytnansnsinrekllrdleqeqqilktlleeqqqrekdkkdkkskrkhelypsekg |
| | kvavwlandikrfmpkafkeqwrgyhhsllqkylayyeqskeelknllpkevfkhfpfkl |
| | kgyfqqqylnqfytdylkrrlsyvnelllniqnfkndkdalkatekecfkffrkqnyiin |
| | piniqiqsilvypiflkrgfldekptmidrekfkenkdteladwfmhyknykednyqkfy |
| | ayplekveekekfkrnkqinkqkkndvytlmmveyiiqkifgdkfveenplvlkgifqsk |
| | aerqqnnthaattgerningilnqpkdikiqgkitvkgvklkdignfrkyeidqrvntfl |
| | dyeprkewmaylpndwkekekqgqlppnnvidrgiskyetvrskillkdvqelekiisde |
| | ikeehrhdlkqgkyynfkyyilngllrqlknenvenykvfklntnpekvnitqlkqeatd |
| | legkafvltyirnkfahnqlpkkefwdycqekygkiekektyaeyfaevfkrekealik |
| | (SEQ ID NO: 552) |
| Phaeodactylibacter | mtntpkrrtlhrhpsyfgaflniarhnafmimehlstkydmedkntldeaqlpnaklfgc |
| xiamenensis | lkkrygkpdvtegvsrdlrryfpflnyplflhlekqqnaeqaatydinpedieftlkgff |
| (NZ_JPOS01000018.1) | rllnqmrnnyshyisntdygkfdklpvgdiyeaaifrlldrgkhtkrfdvfeskhtrhle |
| >WP_044218239.1 | snnseyrprslanspdhentvafvtclflerkyafpflsrldcfrstndaaegdplirka |
| | shecytmfccrlpqpklessdilldmvnelgrcpsalynllseedgarfhikreeitgfe |
| | edpdeelegeivlkrhsdrfpyfalryfddteafqtlrfdvylgrwrtkpvykkriygge |
| | rdrvltqsirtftrlsrllpiyenvkhdavrqneedgklvnpdvtsqfhkswiqiesddr |
| | aflsdriehfsphynfgdqviglkfinpdryaaiqnvfpklpgeekkdkdaklvnetada |
| | iistheirslflyhylskkpisagderrfiqvdtetfikqyidtiklffediksgelqpi |
| | adppnyqkneplpyvrgdkektqeeraqyrerqkeikerrkelntllqnryglsiqyips |
| | rlreyllgykkvpyeklalqklraqrkevkkrikdiekmrtprvgeqatwlaedivfltp |
| | pkmhtperkttkhpqklnndqfrimqsslayfsvnkkaikkffqketgiglsnretshpf |
| | lyridvgrcrgildfytgylkykmdwlddaikkvdnrkhgkkeakkyekylpssiqhktp |
| | leldytrlpvylprglfkkaivkalaahadfqvepeednvifcldqlldgdtqdfynwqr |
| | yyrsalteketdnqlvlahpyaegilgtiktlegkqknnklgnkakqkikdelidlkrak |
| | rrlldreqylravqaedralwlmiqerqkqkaeheeiafdqldlknitkiltesidarlr |
| | ipdtkvditdklplrrygdlrrvakdrrlvnlasyyhvaglseipydlvkkeleeydrrr |
| | vaffehvyqfekevydryaaelrnenpkgestyfshweyvavavkhsadthfnelfkekv |
| | mqlrnkfhhnefpyfdwllpevekasaalyadrvfdvaegyyqkmrklmrq (SEQ ID |
| | NO: 553) |
| Porphyromonas | mntvpasenkgqsrtveddpqyfglylnlarenlieveshvrikfgkkklneeslkqsll |
| gingivalis W83 | cdhllsvdrwtkvyghsrrylpflhyfdpdsqiekdhdsktgvdpdsaqrlirelyslld |
| (NC_002950.2) | flrndfshnrldgttfehlevspdissfitgtyslacgraqsrfadffkpddfvlaknrk |
| >WP_005873511.1 | eqlisvadgkecltvsglafficlfldreqasgmlsrirgfkrtdenwaravhetfcdlc |
| | irhphdrlessntkeallldmlnelnrcprilydmlpeeeraqflpaldensmnnlsens |
| | lneesrllwdgssdwaealtkrirhqdrfpylmlrfieemdllkgirfrvdlgeieldsy |
| | skkvgrngeydrtitdhalafgklsdfqneeevsrmisgeasypvrfslfapryaiydnk |
| | igychtsdpvypksktgekralsnpqsmgfisvhnlrklllmellcegsfsrmqsdflrk |
| | anrildetaegklqfsalfpemrhrfippqnpkskdrrekaettlekykqeikgrkdkln |
| | sqllsafdmnqrqlpsrlldewmnirpashsvklrtyvkqlnedcrlrlrkfrkdgdgka |
| | raiplvgematflsqdivrmiiseetkklitsayynemqrslaqyageenrrqfraivae |
| | lhlldpssghpflsatmetahrytedfykcylekkrewlaktfyrpeqdentkrrisvff |
| | vpdgearkllpllirrrmkeqndlqdwirnkqahpidlpshlfdskimellkvkdgkkkw |
| | neafkdwwstkypdgmqpfyglrrelnihgksysyipsdgkkfadcythlmektvqdkkr |
| | elrtagkpvppdlaadikrsfhravnerefmlrlvqeddrlmlmainkmmtdreedilpg |
| | lknidsildeenqfslavhakvlekegeggdnslslvpatieikskrkdwskyiryrydr |
| | rvpglmshfpehkatldevktllgeydrcrikifdwafalegaimsdrdlkpylhesssr |
| | egksgehstivkmlvekkgcltpdesqylilirnkaahnqfpcaaempliyrdvsakvgs |
| | iegssakdlpegsslvdslwkkyemiirkilpildpenrffgkllnnmsqpindl (SEQ |
| | ID NO: 554) |
| Porphyromonas | mntvpasenkgqsrtveddpqyfglylnlarenlieveshvrikfgkkklneeslkqsll |
| gingivalis F0570 | cdhllsvdrwtkvyghsrrylpflhyfdpdsqiekdhdsktgvdpdsaqrlirelyslld |
| (NZ_K1259168.1) | flrndfshnrldgttfehlevspdissfitgtyslacgraqsrfadffkpddfvlaknrk |
| >WP_021665475.1 | eqlisvadgkecltvsglafficlfldreqasgmlsrirgfkrtnenwaravhetfcdlc |
| | irhphdrlessntkeallldmlnelnrcprilydmlpeeeraqflpaldensmnnlsens |
| | lneesrllwdgssdwaealtkrirhqdrfpylmlrfieemdllkgirfrvdlgeieldsy |
| | skkvgrngeydrtitdhalafgklsdfqneeevsrmisgeasypvrfslfapryaiydnk |
| | igychtsdpvypksktgekralsnpqsmgfisvhdlrklllmellcegsfsrmqsgflrk |
| | anrildetaegklqfsalfpemrhrfippqnpkskdrrekaettlekykqeikgrkdkln |
| | sqllsafdmnqrqlpsrlldewmnirpashsvklrtyvkqlnedcrlrlrkfrkdgdgka |
| | raiplvgematflsqdivrmiiseetkklitsayynemqrslaqyageenrrqfraivae |
| | lhlldpssghpflsatmetahrytedfykcylekkrewlaktfyrpeqdentkrrisvff |
| | vpdgearkllpllirrrmkeqndlqdwirnkqahpidlpshlfdskimellkvkdgkkkw |
| | neafkdwwstkypdgmqpfyglrrelnihgksysyipsdgkkfadcythlmektvqdkkr |
| | elrtagkpvppdlaadikrsfhravnerefmlrlvqeddrlmlmainkmmtdreedilpg |
| | lknidsildkenqfslavhakvlekegeggdnslslvpatieikskrkdwskyiryrydr |
| | rvpglmshfpehkatldevktllgeydrcrikifdwafalegaimsdrdlkpylhesssr |
| | egksgehstivkmlvekkgcltpdesqylilirnkaahnqfpcaaempliyrdvsakvgs |
| | iegssakdlpegsslvdslwkkyemiirkilpildhenrffgkllnnmsqpindl (SEQ |
| | ID NO: 555) |
| Porphyromonas | mntvpasenkgqsrtveddpqyfglylnlarenlieveshvrikfgkkklneeslkqsll |
| gingivalis | cdhllsvdrwtkvyghsrrylpflhyfdpdsqiekdhdsktgvdpdsaqrlirelyslld |
| ATCC 33277 | flrndfshnrldgttfehlevspdissfitgtyslacgraqsrfavffkpddfvlaknrk |
| (NC 010729.1) | eqlisvadgkecltvsgfafficlfldreqasgmlsrirgfkrtdenwaravhetfcdlc |
| >NV_P012458151.1 | irhphdrlessntkeallldmlnelnrcprilydmlpeeeraqflpaldensmnnlsens |
| | ldeesrllwdgssdwaealtkrirhqdrfpylmlrfieemdllkgirfrvdlgeieldsy |
| | skkvgrngeydrtitdhalafgklsdfqneeevsrmisgeasypvrfslfapryaiydnk |
| | igychtsdpvypksktgekralsnpqsmgfisvhdlrklllmellcegsfsrmqsdflrk |
| | anrildetaegklqfsalfpemrhrfippqnpkskdrrekaettlekykqeikgrkdkln |
| | sqllsafdmdqrqlpsrlldewmnirpashsvklrtyvkqlnedcrlrlrkfrkdgdgka |
| | raiplvgematflsqdivrmiiseetkklitsayynemqrslaqyageenrrqfraivae |
| | lrlldpssghpflsatmetahrytegfykcylekkrewlakifyrpeqdentkrrisvff |
| | vpdgearkllpllirrrmkeqndlqdwirnkqahpidlpshlfdskvmellkvkdgkkkw |
| | neafkdwwstkypdgmqpfyglrrelnihgksysyipsdgkkfadcythlmektvrdkkr |
| | elrtagkpvppdlaadikrsfhravnerefmlrlvqeddrlmlmainkmmtdreedilpg |
| | lknidsildeenqfslavhakvlekegeggdnslslvpatieikskrkdwskyiryrydr |
| | rvpglmshfpehkatldevktllgeydrcrikifdwafalegaimsdrdlkpylhesssr |
| | egksgehstivkmlvekkgcltpdesqylilirnkaahnqfpcaaempliyrdvsakvgs |
| | iegssakdlpegsslvdslwkkyemiirkilpildpenrffgkllnnmsqpindl (SEQ |
| | ID NO: 556) |
| Porphyromonas | mntvpasenkgqsrtveddpqyfglylnlarenlieveshvrikfgkkklneeslkqsll |
| gingivalis F0185 | cdhllsvdrwtkvyghsrrylpflhyfdpdsqiekdhdsktgvdpdsaqrlirelyslld |
| (AWVC01000122.1) | flrndfshnrldgttfehlevspdissfitgtyslacgraqsrfadffkpddfvlaknrk |
| >ERJ81987.1 | eqlisvadgkecltvsglafficlfldreqasgmlsrirgfkrtdenwaravhetfcdlc |
| | irhphdrlessntkeallldmlnelnrcprilydmlpeeeraqflpaldensmnnlsens |
| | lneesrllwdgssdwaealtkrirhqdrfpylmlrfieemdllkgirfrvdlgeieldsy |
| | skkvgrngeydrtitdhalafgklsdfqneeevsrmisgeasypvrfslfapryaiydnk |
| | igychtsdpvypksktgekralsnpqsmgfisvhdlrklllmellcegsfsrmqsgflrk |
| | anrildetaegklqfsalfpemrhrfippqnpkskdrrekaettlekykqeikgrkdkln |
| | sqllsafdmnqrqlpsrlldewmnirpashsvklrtyvkqlnedcrlrlrkfrkdgdgka |
| | raiplvgematflsqdivrmiiseetkklitsayynemqrslaqyageenrrqfraivae |
| | lhlldpssghpflsatmetahrytedfykcylekkrewlaktfyrpeqdentkrrisvff |
| | vpdgearkllpllirrrmkeqndlqdwirnkqahpidlpshlfdskimellkvkdgkkkw |
| | neafkdwwstkypdgmqpfyglrrelnihgksysyipsdgkkfadcythlmektvqdkkr |
| | elrtagkpvppdlaadikrsfhravnerefmlrlvqeddrlmlmainkmmtdreedilpg |
| | lknidsildeenqfslavhakvlekegeggdnslslvpatieikskrkdwskyiryrydr |
| | rvpglmshfpehkatldevktllgeydrcrikifdwafalegaimsdrdlkpylhesssr |
| | egksgehstivkmlvekkgcltpdesqylilirnkaahnqfpcaaempliyrdvsakvgs |
| | iegssakdlpegsslvdslwkkyemiirkilpildhenrffgkllnnmsqpindl (SEQ |
| | ID NO: 557) |
| Porphyromonas | mntvpasenkgqsrtveddpqyfglylnlarenlieveshvrikfgkkklneeslkqsll |
| gingivalis F0185 | cdhllsvdrwtkvyghsrrylpflhyfdpdsqiekdhdsktgvdpdsaqrlirelyslld |
| (NZ_K1259960.1) | flrndfshnrldgttfehlevspdissfitgtyslacgraqsrfadffkpddfvlaknrk |
| >WP_021677657.1 | eqlisvadgkecltvsglafficlfldreqasgmlsrirgfkrtdenwaravhetfcdlc |
| | irhphdrlessntkeallldmlnelnrcprilydmlpeeeraqflpaldensmnnlsens |
| | lneesrllwdgssdwaealtkrirhqdrfpylmlrfieemdllkgirfrvdlgeieldsy |
| | skkvgrngeydrtitdhalafgklsdfqneeevsrmisgeasypvrfslfapryaiydnk |
| | igychtsdpvypksktgekralsnpqsmgfisvhdlrklllmellcegsfsrmqsgflrk |
| | anrildetaegklqfsalfpemrhrfippqnpkskdrrekaettlekykqeikgrkdkln |
| | sqllsafdmnqrqlpsrlldewmnirpashsvklrtyvkqlnedcrlrlrkfrkdgdgka |
| | raiplvgematflsqdivrmiiseetkklitsayynemqrslaqyageenrrqfraivae |
| | lhlldpssghpflsatmetahrytedfykcylekkrewlaktfyrpeqdentkrrisvff |
| | vpdgearkllpllirrrmkeqndlqdwirnkqahpidlpshlfdskimellkvkdgkkkw |
| | neafkdwwstkypdgmqpfyglrrelnihgksysyipsdgkkfadcythlmektvqdkkr |
| | elrtagkpvppdlaadikrsfhravnerefmlrlvqeddrlmlmainkmmtdreedilpg |
| | lknidsildeenqfslavhakvlekegeggdnslslvpatieikskrkdwskyiryrydr |
| | rvpglmshfpehkatldevktllgeydrcrikifdwafalegaimsdrdlkpylhesssr |
| | egksgehstivkmlvekkgcltpdesqylilirnkaahnqfpcaaempliyrdvsakvgs |
| | iegssakdlpegsslvdslwkkyemiirkilpildhenrffgkllnnmsqpindl (SEQ |
| | ID NO: 558) |
| Porphyromonas | mntvpasenkgqsrtveddpqyfglylnlarenlieveshvrikfgkkklneeslkqsll |
| gingivalis SJD2 | cdhllsvdrwtkvyghsrrylpflhyfdpdsqiekdhdsktgvdpdsaqrlirelyslld |
| (NZ_K1629875.1) | flrndfshnrldgttfehlevspdissfitgtyslacgraqsrfadffkpddfvlaknrk |
| >WP_023846767.1 | eqlisvadgkecltvsglafficlfldreqasgmlsrirgfkrtdenwaravhetfcdlc |
| | irhphdrlessntkeallldmlnelnrcprilydmlpeeeraqflpaldensmnnlsens |
| | lneesrllwdgssdwaealtkrirhqdrfpylmlrfieemdllkgirfrvdlgeieldsy |
| | skkvgrngeydrtitdhalafgklsdfqneeevsrmisgeasypvrfslfapryaiydnk |
| | igychtsdpvypksktgekralsnprsmgfisvhdlrklllmellcegsfsrmqsdflrk |
| | anrildetaegklqfsalfpemrhrfippqnpkskdrrekaettlekykqeikgrkdkln |
| | sqllsafdmnqrqlpsrlldewmnirpashsvklrtyvkqlnedcrlrlrkfrkdgdgka |
| | raiplvgematflsqdivrmiiseetkklitsayynemqrslaqyageenrrqfraivae |
| | lhlldpssghpflsatmetahrytedfykcylekkrewlaktfyrpeqdentkrrisvff |
| | vpdgearkllpllirrrmkeqndlqdwirnkqahpidlpshlfdskimellkvkdgkkkw |
| | neafkdwwstkypdgmqpfyglrrelnihgksysyipsdgkkfadcythlmektvqdkkr |
| | elrtagkpvppdlaadikrsfhravnerefmlrlvqeddrlmlmainkmmtdreedilpg |
| | lknidsildeenqfslavhakvlekegeggdnslslvpatieikskrkdwskyiryrydr |
| | rvpglmshfpehkatldevktllgeydrcrikifdwafalegaimsdrdlkpylhesssr |
| | egksgehstivkmlvekkgcltpdesqylilirnkaahnqfpcaaempliyrdvsakvgs |
| | iegssakdlpegsslvdslwkkyemiirkilpildpenrffgkllnnmsqpindl (SEQ |
| | ID NO: 559) |
| Porphyromonas | mntvpasenkgqsrtveddpqyfglylnlarenlieveshvrikfgkkklneeslkqsll |
| gingivalis F0568 | cdhllsvdrwtkvyghsrrylpflhyfdpdsqiekdhdsktgvdpdsaqrlirelyslld |
| (AWUU01000145.1) | flrndfshnrldgttfehlevspdissfitgtyslacgraqsrfadffkpddfvlaknrk |
| >ERJ65637.1 | eqlisvadgkecltvsglafficlfldreqasgmlsrirgfkrtdenwaravhetfcdlc |
| | irhphdrlessntkeallldmlnelnrcprilydmlpeeeraqflpaldensmnnlsens |
| | lneesrllwdgssdwaealtkrirhqdrfpylmlrfieemdllkgirfrvdlgeieldsy |
| | skkvgrngeydrtitdhalafgklsdfqneeevsrmisgeasypvrfslfapryaiydnk |
| | igychtsdpvypksktgekralsnprsmgfisvhdlrklllmellcegsfsrmqsdflrk |
| | anrildetaegklqfsalfpemrhrfippqnpkskdrrekaettlekykqeikgrkdkln |
| | sqllsafdmdqrqlpsrlldewmnirpashsvklrtyvkqlnedcrlrlqkfrkdgdgka |
| | raiplvgematflsqdivrmiiseetkklitsayynemqrslaqyageenrhqfraivae |
| | lrlldpssghpflsatmetahrytedfykcylekkrewlaktfyrpeqdentkrrisvff |
| | vpdgearkllpllirrrmkeqndlqdwirnkqahpidlpshlfdskimellkvkdgkkkw |
| | neafkdwwstkypdgmqpfyglrrelnihgksysyipsdgkkfadcythlmektvqdkkr |
| | elrtagkpvppdlaadikrsfhravnerefmlrlvqeddrlmlmainkmmtdreedilpg |
| | lknidsildeenqfslavhakvlekegeggdnslslvpatieikskrkdwskyiryrydr |
| | rvpglmshfpehkatldevktllgeydrcrikifdwafalegaimsdrdlkpylhesssr |
| | egksgehstivkmlvekkgcltpdesqylilirnkaahnqfpcaaempliyrdvsakvgs |
| | iegssakdlpegsslvdslwkkyemiirkilpildpenrffgkllnnmsqpindl (SEQ |
| | ID NO: 560) |
| Porphyromonas | mntvpasenkgqsrtveddpqyfglylnlarenlieveshvrikfgkkklneeslkqsll |
| gingivalis W4087 | cdhllsvdrwtkvyghsrrylpflhyfdpdsqiekdhdsktgvdpdsaqrlirelyslld |
| (AWVE01000130.1) | flrndfshnrldgttfehlevspdissfitgtyslacgraqsrfadffkpddfvlaknrk |
| >ERJ87335.1 | eqlisvadgkecltvsglafficlfldreqasgmlsrirgfkrtdenwaravhetfcdlc |
| | irhphdrlessntkeallldmlnelnrcprilydmlpeeeraqflpaldensmnnlsens |
| | lneesrllwdgssdwaealtkrirhqdrfpylmlrfieemdllkgirfrvdlgeieldsy |
| | skkvgrngeydrtitdhalafgklsdfqneeevsrmisgeasypvrfslfapryaiydnk |
| | igychtsdpvypksktgekralsnprsmgfisvhdlrklllmellcegsfsrmqsdflrk |
| | anrildetaegklqfsalfpemrhrfippqnpkskdrrekaettlekykqeikgrkdkln |
| | sqllsafdmdqrqlpsrlldewmnirpashsvklrtyvkqlnedcrlrlqkfrkdgdgka |
| | raiplvgematflsqdivrmiiseetkklitsayynemqrslaqyageenrhqfraivae |
| | lrlldpssghpflsatmetahrytedfykcylekkrewlaktfyrpeqdentkrrisvff |
| | vpdgearkllpllirrrmkeqndlqdwirnkqahpidlpshlfdskvmellkvkdgkkkw |
| | neafkdwwstkypdgmqpfyglrrelnihgksysyipsdgkkfadcythlmektvrdkkr |
| | elrtagkpvppdlaayikrsfhravnerefmlrlvqeddrlmlmainkimtdreedilpg |
| | lknidsildkenqfslavhakvlekegeggdnslslvpatieikskrkdwskyiryrydr |
| | rvpglmshfpehkatldevktllgeydrcrikifdwafalegaimsdrdlkpylhesssr |
| | egksgehstivkmlvekkgcltpdesqylilirnkaahnqfpcaaeipliyrdvsakvgs |
| | iegssakdlpegsslvdslwkkyemiirkilpildpenrffgkllnnmsqpindl (SEQ |
| | ID NO: 561) |
| Porphyromonas | mntvpasenkgqsrtveddpqyfglylnlarenlieveshvrikfgkkklneeslkqsll |
| gingivalis W4087 | cdhllsvdrwtkvyghsrrylpflhyfdpdsqiekdhdsktgvdpdsaqrlirelyslld |
| (NZ_K1260263.1) | flrndfshnrldgttfehlevspdissfitgtyslacgraqsrfadffkpddfvlaknrk |
| >WP_021680012.1 | eqlisvadgkecltvsglafficlfldreqasgmlsrirgfkrtdenwaravhetfcdlc |
| | irhphdrlessntkeallldmlnelnrcprilydmlpeeeraqflpaldensmnnlsens |
| | lneesrllwdgssdwaealtkrirhqdrfpylmlrfieemdllkgirfrvdlgeieldsy |
| | skkvgrngeydrtitdhalafgklsdfqneeevsrmisgeasypvrfslfapryaiydnk |
| | igychtsdpvypksktgekralsnprsmgfisvhdlrklllmellcegsfsrmqsdflrk |
| | anrildetaegklqfsalfpemrhrfippqnpkskdrrekaettlekykqeikgrkdkln |
| | sqllsafdmdqrqlpsrlldewmnirpashsvklrtyvkqlnedcrlrlqkfrkdgdgka |
| | raiplvgematflsqdivrmiiseetkklitsayynemqrslaqyageenrhqfraivae |
| | lrlldpssghpflsatmetahrytedfykcylekkrewlaktfyrpeqdentkrrisvff |
| | vpdgearkllpllirrrmkeqndlqdwirnkqahpidlpshlfdskvmellkvkdgkkkw |
| | neafkdwwstkypdgmqpfyglrrelnihgksysyipsdgkkfadcythlmektvrdkkr |
| | elrtagkpvppdlaayikrsfhravnerefmlrlvqeddrlmlmainkimtdreedilpg |
| | lknidsildkenqfslavhakvlekegeggdnslslvpatieikskrkdwskyiryrydr |
| | rvpglmshfpehkatldevktllgeydrcrikifdwafalegaimsdrdlkpylhesssr |
| | egksgehstivkmlvekkgcltpdesqylilirnkaahnqfpcaaeipliyrdvsakvgs |
| | iegssakdlpegsslvdslwkkyemiirkilpildpenrffgkllnnmsqpindl (SEQ |
| | ID NO: 562) |
| Porphyromonas | mntvpasenkgqsrtveddpqyfglylnlarenlieveshvrikfgkkklneeslkqsll |
| gingivalis F0568 | cdhllsvdrwtkvyghsrrylpflhyfdpdsqiekdhdsktgvdpdsaqrlirelyslld |
| (NZ_K1258981.1) | flrndfshnrldgttfehlevspdissfitgtyslacgraqsrfadffkpddfvlaknrk |
| >WP_021663197.1 | eqlisvadgkecltvsglafficlfldreqasgmlsrirgfkrtdenwaravhetfcdlc |
| | irhphdrlessntkeallldmlnelnrcprilydmlpeeeraqflpaldensmnnlsens |
| | lneesrllwdgssdwaealtkrirhqdrfpylmlrfieemdllkgirfrvdlgeieldsy |
| | skkvgrngeydrtitdhalafgklsdfqneeevsrmisgeasypvrfslfapryaiydnk |
| | igychtsdpvypksktgekralsnprsmgfisvhdlrklllmellcegsfsrmqsdflrk |
| | anrildetaegklqfsalfpemrhrfippqnpkskdrrekaettlekykqeikgrkdkln |
| | sqllsafdmdqrqlpsrlldewmnirpashsvklrtyvkqlnedcrlrlqkfrkdgdgka |
| | raiplvgematflsqdivrmiiseetkklitsayynemqrslaqyageenrhqfraivae |
| | lrlldpssghpflsatmetahrytedfykcylekkrewlaktfyrpeqdentkrrisvff |
| | vpdgearkllpllirrrmkeqndlqdwirnkqahpidlpshlfdskimellkvkdgkkkw |
| | neafkdwwstkypdgmqpfyglrrelnihgksysyipsdgkkfadcythlmektvqdkkr |
| | elrtagkpvppdlaadikrsfhravnerefmlrlvqeddrlmlmainkmmtdreedilpg |
| | lknidsildeenqfslavhakvlekegeggdnslslvpatieikskrkdwskyiryrydr |
| | rvpglmshfpehkatldevktllgeydrcrikifdwafalegaimsdrdlkpylhesssr |
| | egksgehstivkmlvekkgcltpdesqylilirnkaahnqfpcaaempliyrdvsakvgs |
| | iegssakdlpegsslvdslwkkyemiirkilpildpenrffgkllnnmsqpindl (SEQ |
| | ID NO: 563) |
| Porphyromonas | mntvpasenkgqsrtveddpqyfglylnlarenlieveshvrikfgkkklneeslkqsll |
| gingivalis | cdhllsvdrwtkvyghsrrylpflhyfdpdsqiekdhdsktgvdpdsaqrlirelyslld |
| (NZ_LOEL01000010.1) | flrndfshnrldgttfehlevspdissfitgtyslacgraqsrfadffkpddfvlaknrk |
| >WP_061156637.1 | eqlisvadgkecltvsglafficlfldreqasgmlsrirgfkrtdenwaravhetfcdlc |
| | irhphdrlessntkeallldmlnelnrcprilydmlpeeeraqflpaldensmnnlsens |
| | lneesrllwdgssdwaealtkrirhqdrfpylmlrfieemdllkgirfrvdlgeieldsy |
| | skkvgrngeydrtitdhalafgklsdfqneeevsrmisgeasypvrfslfapryaiydnk |
| | igychtsdpvypksktgekralsnpqsmgfisvhdlrklllmellcegsfsrmqsgflrk |
| | anrildetaegklqfsalfpemrhrfippqnpkskdrrekaettlekykqeikgrkdkln |
| | sqllsafdmnqrqlpsrlldewmnirpashsvklrtyvkqlnedcrlrlrkfrkdgdgka |
| | raiplvgematflsqdivrmiiseetkklitsayynemqrslaqyageenrrqfraivae |
| | lhlldpssghpflsatmetahrytedfykcylekkrewlaktfyrpeqdentkrrisvff |
| | vpdgearkllpllirrrmkeqndlqdwirnkqahpidlpshlfdskimellkvkdgkkkw |
| | neafkdwwstkypdgmqpfyglrrelnihgksysyipsdgkkfadcythlmektvqdkkr |
| | elrtagkpvppdlaadikrsfhravnerefmlrlvqeddrlmlmainkmmtdreedilpg |
| | lknidsildkenqfslavhakvlekegeggdnslslvpatieikskrkdwskyiryrydr |
| | rvpglmshfpehkatldevktllgeydrcrikifdwafalegaimsdrdlkpylhesssr |
| | egksgehstivkmlvekkgcltpdesqylilirnkaahnqfpcaaempliyrdvsakvgs |
| | iegssakdlpegsslvdslwkkyemiirkilpildpenrffgkllnnmsqpindl (SEQ |
| | ID NO: 564) |
| Porphyromonas | mntvpatenkgqsrtveddpqyfglylnlarenlieveshvrikfgkkklneeslkqsll |
| gulae | cdhllsidrwtkvyghsrrylpflhcfdpdsgiekdhdsktgvdpdsaqrlirelyslld |
| (NZ_JRAQ01000019.1) | flrndfshnrldgttfehlkvspdissfitgaytfaceraqsrfadffkpddfllaknrk |
| >NV1_039445055.1 | eqlisvadgkecltvsgfafficlfldreqasgmlsrirgfkrtdenwaravhetfcdlc |
| | irhphdrlessntkeallldmlnelnrcprilydmlpeeeraqflpaldensmnnlsens |
| | lneesrllwdgssdwaealtkrirhqdrfpylmlrfieemdllkgirfrvdlgeieldsy |
| | skkvgrngeydrtitdhalafgklsdfqneeevsrmisgeasypvrfslfapryaiydnk |
| | igychtsdpvypksktgekralsnpqsmgfisvhdlrklllmellcegsfsrmqsdflrk |
| | anrildetaegklqfsalfpemrhrfippqnpkskdrrekaettlekykqeikgrkdkln |
| | sqllsafdmnqrqlpsrlldewmnirpashsvklrtyvkqlnedcrlrlrkfrkdgdgka |
| | raiplvgematflsqdivrmiiseetkklitsayynemqrslaqyageenrrqfraivae |
| | lhlldpssghpflsatmetahrytedfykcylekkrewlaktfyrpeqdentkrrisvff |
| | vpdgearkllpllirrrmkeqndlqdwirnkqahpidlpshlfdskimellkvkdgkkkw |
| | neafkdwwstkypdgmqpfyglrrelnihgksysyipsdgkkfadcythlmektvrdkkr |
| | elrtagkpvppdlaayikrsfhravnerefmlrlvqeddrlmlmainkmmtdreedilpg |
| | lknidsildeenqfslavhakvlekegeggdnslslvpatieikskrkdwskyiryrydr |
| | rvpglmshfpehkatldevktllgeydrcrikifdwafalegaimsdrdlkpylhesssr |
| | egksgehstivkmlvekkgcltpdesqylilirnkaahnqfpcaaempliyrdvsakvgs |
| | iegssakdlpegsslvdslwkkyemiirkilpildhenrffgkllnnmsqpindl (SEQ |
| | ID NO: 565) |
| Bacteroides | mesiknsqkstgktlqkdppyfglylnmallnvrkvenhirkwlgdvallpeksgfhsll |
| pyogenes | ttdnlssakwtrfyyksrkflpflemfdsdkksyenrrettecldtidrqkissllkevy |
| F0041 | gklqdirnafshyhiddqsvkhtaliissemhrfienaysfalqktrarftgvfvetdfl |
| (KE993153.1) | qaeekgdnkkffaiggnegiklkdnalifliclfldreeafkflsratgfkstkekgfla |
| >ER181700.1 | vretfcalccrqpherllsvnpreallmdmlnelnrcpdilfemldekdqksflpllgee |
| | eqahilenslndelceaiddpfemiaslskrvryknrfpylmlryieeknllpfirfrid |
| | lgclelasypkkmgeennyersvtdhamafgrltdfhnedavlqqitkgitdevrfslya |
| | pryaiynnkigfvrtggsdkisfptlkkkggeghcvaytlqntksfgfisiydlrkilll |
| | sfldkdkaknivsglleqcekhwkdlsenlfdairtelqkefpvplirytlprskggklv |
| | sskladkqekyeseferrkeklteilsekdfdlsqiprrmidewlnvlptsrekklkgyv |
| | etlkldcrerlrvfekrekgehpvpprigematdlakdiirmvidqgvkqritsayysei |
| | qrclaqyagddnrrhldsiirelrlkdtknghpflgkvlrpglghteklyqryfeekkew |
| | leatfypaaspkrvprfvnpptgkqkelpliirnlmkerpewrdwkqrknshpidlpsql |
| | feneicrllkdkigkepsgklkwnemfklywdkefpngmqrfyrckrrvevfdkvveyey |
| | seeggnykkyyealidevvrqkissskeksklqvedltlsvrrvfkrainekeyqlrllc |
| | eddrllfmavrdlydwkeaqldldkidnmlgepvsysqviqleggqpdavikaecklkdv |
| | sklmrycydgrvkglmpyfanheatqeqvemelrhyedhrrrvfnwvfaleksvlknekl |
| | rrfyeesqggcehrrcidalrkaslvseeeyeflvhirnksahnqfpdleigklppnvts |
| | gfceciwskykaiicriipfidperrffgklleqk (SEQ ID NO: 566) |
| Bacteroides | mesiknsqkstgktlqkdppyfglylnmallnvrkvenhirkwlgdvallpeksgfhsll |
| pyogenes | ttdnlssakwtrfyyksrkflpflemfdsdkksyenrretaecldtidrqkissllkevy |
| JCM 10003 | gklqdirnafshyhiddqsvkhtaliissemhrfienaysfalqktrarftgvfvetdfl |
| (NZ_BAIU01000001.1) | qaeekgdnkkffaiggnegiklkdnalifliclfldreeafkflsratgfkstkekgfla |
| >WP_034542281.1 | vretfcalccrqpherllsvnpreallmdmlnelnrcpdilfemldekdqksflpllgee |
| | eqahilenslndelceaiddpfemiaslskrvryknrfpylmlryieeknllpfirfrid |
| | lgclelasypkkmgeennyersvtdhamafgrltdfhnedavlqqitkgitdevrfslya |
| | pryaiynnkigfvrtsgsdkisfptlkkkggeghcvaytlqntksfgfisiydlrkilll |
| | sfldkdkaknivsglleqcekhwkdlsenlfdairtelqkefpvplirytlprskggklv |
| | sskladkqekyeseferrkeklteilsekdfdlsqiprrmidewlnvlptsrekklkgyv |
| | etlkldcrerlrvfekrekgehplpprigematdlakdiirmvidqgvkqritsayysei |
| | qrclaqyagddnrrhldsiirelrlkdtknghpflgkvlrpglghteklyqryfeekkew |
| | leatfypaaspkrvprfvnpptgkqkelpliirnlmkerpewrdwkqrknshpidlpsql |
| | feneicrllkdkigkepsgklkwnemfklywdkefpngmqrfyrckrrvevfdkvveyey |
| | seeggnykkyyealidevvrqkissskeksklqvedltlsvrrvfkrainekeyqlrllc |
| | eddrllfmavrdlydwkeaqldldkidnmlgepvsysqviqleggqpdavikaecklkdv |
| | sklmrycydgrvkglmpyfanheatqeqvemelrhyedhrrrvfnwvfaleksvlknekl |
| | rrfyeesqggcehrrcidalrkaslvseeeyeflvhirnksahnqfpdleigklppnvts |
| | gfceciwskykaiicriipfidperrffgklleqk (SEQ ID NO: 567) |
| Alistipes | msneigafrehqfayapgnekqeeatfatyfnlalsnvegmmfgevesnpdkieksldtl |
| sp. ZOR0009 | ppailrgiasfiwlskedhpdkaysteevkvivtdlvrrlcfyrnyfshcfyldtqyfys |
| (NZ_JTLD01000029.1) | delvdttaigeklpynfhhfitnrlfryslpeitlfrwnegerkyeilrdgliffcclfl |
| >WP_047447901.1 | krgqaerflnelrffkrtdeegrikrtiftkyctreshkhigieeqdflifqdiigdlnr |
| | vpkvcdgvvdlskeneryiknretsnesdenkaryrllirekdkfpyylmryivdfgvlp |
| | citfkqndystkegrgqfhpadaavageercynfvvrngnvyysympqaqnvvriselqg |
| | tisveelrnmvyasingkdvnksveqylyhlhllyekiltisgqtikegrvdvedyrpll |
| | dklllrpasngeelrrelrkllpkrvcdllsnrfdcsegvsavekrlkaillrheqllls |
| | qnpalhidkiksvidylylffsddekfrqqptekahrglkdeefqmyhylvgdydshpla |
| | lwkeleasgrlkpemrkltsatslhglymlclkgtvewcrkqlmsigkgtakveaiadry |
| | glklydklkeytpeqlerevklvvmhgyaaaatpkpkaqaaipskltelrfysflgkrem |
| | sfaafirqdkkaqklwlrnfytveniktlqkrqaaadaackklynlvgevervhtndkvl |
| | vlvaqryrerllnvgskcavtldnperqqkladvyevqnawlsirfddldftlthvnlsn |
| | lrkaynliprkhilafkeyldnrvkqklceecrnvrrkedlctccsprysnitswlkenh |
| | sessiereaatmmlldverkllsfllderrkaiieygkfipfsalvkecrladaglcgir |
| | ndvlhdnvisyadaigklsayfpkeaseaveyirrtkevreqrreelmanssq (SEQ |
| | ID NO: 568) |
| Flavobacterium | menlnkildkeneiciskifntkgiaapitekaldnikskqkndlnkearlhyfsighsf |
| branchiophilum | kqidtkkvfdyvlieelkdekplkfitlqkdfftkefsiklqklinsirninnhyvhnfn |
| FL-15 | dinlnkidsnvfhflkesfelaiiekyykvnkkypldneivlflkelfikdentallnyf |
| (NC_016001.1) | tnlskdeaieyiltftitenkiwninnehnilniekgkyltfeamlflitiflykneanh |
| >WP_014084666.1 | llpklydfknnkskqelftffskkftsqdidaeeghlikfrdmiqylnhyptawnndlkl |
| | esenknkimttklidsiiefelnsnypsfatdiqfkkeakaflfasnkkrnqtsfsnksy |
| | neeirhnphikqyrdeiasaltpisfnvkedkfkifvkkhvleeyfpnsigyekfleynd |
| | ftekekedfglklysnpktnklieridnhklvkshgrnqdrfmdfsmrflaennyfgkda |
| | ffkcykfydtqeqdeflqsnennddvkfhkgkvttyikyeehlknysywdcpfveennsm |
| | svkisigseekilkiqrnlmiyflenalynenvenqgyklvnnyyrelkkdveesiasld |
| | liksnpdfkskykkilpkrllhnyapakqdkapenafetllkkadfreeqykkllkkaeh |
| | eknkedfvkrnkgkqfklhfirkacqmmyfkekyntlkegnaafekkdpviekrknkehe |
| | fghhknlnitreefndyckwmfafngndsykkylrdlfsekhffdnqeyknlfessvnle |
| | afyaktkelfkkwietnkptnnenrytlenyknlilqkqvfinvyhfskylidknllnse |
| | nnviqykslenveylisdfyfqsklsidqyktcgklfnklksnkledcllyeiaynyidk |
| | knvhkidigkiltskiiltindantpykisvpfnklerytemiaiknqnnlkarflidlp |
| | lylsknkikkgkdsagyeiiikndleiedintinnkiindsvkftevlmelekyfilkdk |
| | cilsknyidnseipslkqfskvwikeneneiinyrniachfhlplletfdnlllnveqkf |
| | ikeelqnvstindlskpqeylillfikfkhnnfylnlfnknesktikndkevkknrvlqk |
| | finqvilkkk (SEQ ID NO: 569) |
| Prevotella | mskeckkgrqekkrrlqkanfsisltgkhvfgayfnmartnfvktinyilpiagvrgnys |
| sp. MA2016 | enqinkmlhalfligagrneeltteqkqwekklrinpeqqtkfqkllfkhfpvlgpmmad |
| (NZ_JHUW01000010.1) | vadhkaylnkkkstvqtedetfamlkgvsladcldiiclmadtltecrnfythkdpynkp |
| >WP_036929175.1 | sqladqylhqemiakkldkvvvasrrilkdreglsvnevefltgidhlhqevlkdefgna |
| | kvkdgkvmktfveyddfyfkisgkrlvngytvttkddkpvnvntmlpalsdfgllyfcvl |
| | flskpyaklfidevrlfeyspfddkenmimsemlsiyrirtprlhkidshdskatlamdi |
| | fgelrrcpmelynlldknagqpffhdevkhpnshtpdvskrlryddrfptlalryidete |
| | lfkrirfqlqlgsfrykfydkencidgrvrvrriqkeingygrmqevadkrmdkwgdliq |
| | kreersvkleheelyinldqfledtadstpyvtdrrpaynihanriglywedsqnpkqyk |
| | vfdengmyipelvvtedkkapikmpaprcalsvydlpamlfyeylreqqdnefpsaeqvi |
| | ieyeddyrkffkavaegklkpfkrpkefrdflkkeypklrmadipkklqlflcshglcyn |
| | nkpetvyerldrltlqhleerelhiqnrlehyqkdrdmignkdnqygkksfsdvrhgala |
| | rylaqsmmewqptklkdkekghdkltglnynvltaylatyghpqvpeegftprtleqvli |
| | nahliggsnphpfinkvlalgnrnieelylhyleeelkhirsriqslssnpsdkalsalp |
| | fihhdrmryhertseemmalaaryttiqlpdglftpyileilqkhytensdlqnalsqdv |
| | pvklnptcnaaylitlfyqtvlkdnaqpfylsdktytrnkdgekaesfsfkrayelfsvl |
| | nnnkkdtfpfemiplfltsdeigerlsaklldgdgnpvpevgekgkpatdsqgntiwkrr |
| | iysevddyaekltdrdmkisfkgeweklprwkqdkiikrrdetrrqmrdellqrmpryir |
| | dikdnertlrryktqdmvlfllaekmftniiseqssefnwkqmrlskvcneaflrqtltf |
| | rvpvtvgettiyvegenmslknygefyrfltddrlmsllnnivetlkpnengdlvirhtd |
| | lmselaaydqyrstifmliqsienliitnnavlddpdadgfwvredlpkrnnfaslleli |
| | nqlnnveltdderkllvairnafshnsynidfslikdvkhlpevakgilqhlqsmlgvei |
| | tk (SEQ ID NO: 570) |
| Myroides | mkdilttdttekqnrfyshkiadkyffggyfnlasnniyevfeevnkrntfgklakrdng |
| odomtimimus | nlknyiihvfkdelsisdfekrvaifasyfpiletvdkksikernrtidltlsgrirqfr |
| CCUG 10230 | emlislvtavdqlrnfythyhhsdivienkvldflnssfvstalhvkdkylktdktkefl |
| (AGEC02000017.1) | ketiaaeldilieaykkkqiekkntrfkankredilnaiyneafwsfindkdkdkdketv |
| >EHO06562.1 | vakgadayfeknhhksndpdfalnisekgivyllsffltnkemdslkanitgfkgkvdre |
| | sgnsikymatqrlysfhtyrglkqkirtseegvketllmqmidelskvpnvvyqhlsttq |
| | qnsfiedwneyykdyeddvetddlsrvihpvirkryedrfnyfairfldeffdfptlrfq |
| | vhlgdyvhdrrtkqlgkvesdriikekvtvfarlkdinsakasyfhsleeqdkeeldnkw |
| | tlfpnpsydfpkehtlqhqgeqknagkigiyvklrdtqykekaaleearkslnpkersat |
| | kaskydiitqiieandnvksekplvftgqpiaylsmndihsmlfslltdnaelkktpeev |
| | eaklidgigkqineilskdtdtkilkkykdndlketdtdkitrdlardkeeieklileqk |
| | qraddynytsstkfnidksrkrkhllfnaekgkigvwlandikrfmfkeskskwkgyqht |
| | elqklfayfdtsksdlelilsnmvmvkdypielidlvkksrtivdflnkylearleyien |
| | vitrvknsigtpqfktvrkecftflkksnytvvsldkqverilsmplfiergfmddkptm |
| | legksykqhkekfadwfvhykensnyqnfydtevyeittedkrekakvtkkikqqqkndv |
| | ftlmmvnymleevlklssndrlslnelyqtkeerivnkqvakdtgernknyiwnkvvdlq |
| | lcdglvhidnvklkdignfrkyendsrvkefltyqsdivwsaylsnevdsnklyvierql |
| | dnyesirskellkevqeiecsvynqvankeslkqsgnenfkqyvlqgllpigmdvremli |
| | lstdvkfkkeeiiqlgqageveqdlysliyirnkfahnqlpikeffdfcennyrsisdne |
| | yyaeyymeifrsikekyan (SEQ ID NO: 571) |
| Myroides | mkdilttdttekqnrfyshkiadkyffggyfnlasnniyevfeevnkrntfgklakrdng |
| odomtimimus | nlknyiihvfkdelsisdfekrvaifasyfpiletvdkksikernrtidltlsgrirqfr |
| CCUG 3837 | emlislvtavdqlrnfythyhhseivienkvldflnsslvstalhvkdkylktdktkefl |
| (AGEC01000016.1) | ketiaaeldilieaykkkqiekkntrfkankredilnaiyneafwsfindkdkdketvva |
| >EKB06014.1 | kgadayfeknhhksndpdfalnisekgivyllsffltnkemdslkanitgfkgkvdresg |
| | nsikymatqrlysfhtyrglkqkirtseegvketllmqmidelskvpnvvyqhlsttqqn |
| | sfiedwneyykdyeddvetddlsrvihpvirkryedrfnyfairfldeffdfptlrfqvh |
| | lgdyvhdrrtkqlgkvesdriikekvtvfarlkdinsakasyfhsleeqdkeeldnkwtl |
| | fpnpsydfpkehtlqhqgeqknagkigiyvklrdtqykekaaleearkslnpkersatka |
| | skydiitqiieandnvksekplvftgqpiaylsmndihsmlfslltdnaelkktpeevea |
| | klidgigkqineilskdtdtkilkkykdndlketdtdkitrdlardkeeieklileqkqr |
| | addynytsstkfnidksrkrkhllfnaekgkigvwlandikrfmfkeskskwkgyqhtel |
| | qklfayfdtsksdlelilsdmvmvkdypielidlvrksrtivdflnkylearlgyienvi |
| | trvknsigtpqfktvrkecfaflkesnytvasldkqierilsmplfiergfmdskptmle |
| | gksyqqhkedfadwfvhykensnyqnfydtevyeiitedkreqakvtkkikqqqkndvft |
| | lmmvnymleevlklpsndrlslnelyqtkeerivnkqvakdtgernknyiwnkvvdlqlc |
| | eglvridkvklkdignfrkyendsrvkefltyqsdivwsgylsnevdsnklyvierqldn |
| | yesirskellkevqeiecivynqvankeslkqsgnenfkqyvlqgllprgtdvremlils |
| | tdvkfkkeeimqlgqvreveqdlysliyirnkfahnqlpikeffdfcennyrpisdneyy |
| | aeyymeifrsikekyas (SEQ ID NO: 572) |
| Myroides | mkdilttdttekqnrfyshkiadkyffggyfnlasnniyevfeevnkrntfgklakrdng |
| odomtimimus | nlknyiihvfkdelsisdfekrvaifasyfpiletvdkksikernrtidltlsgrirqfr |
| CCUG 3837 | emlislvtavdqlrnfythyhhseivienkvldflnsslvstalhvkdkylktdktkefl |
| (NZ_111815535 1) | ketiaaeldilieaykkkqiekkntrfkankredilnaiyneafwsfindkdkdketvva |
| >WP_006265509.1 | kgadayfeknhhksndpdfalnisekgivyllsffltnkemdslkanitgfkgkvdresg |
| | nsikymatqrlysfhtyrglkqkirtseegvketllmqmidelskvpnvvyqhlsttqqn |
| | sfiedwneyykdyeddvetddlsrvihpvirkryedrfnyfairfldeffdfptlrfqvh |
| | lgdyvhdrrtkqlgkvesdriikekvtvfarlkdinsakasyfhsleeqdkeeldnkwtl |
| | fpnpsydfpkehtlqhqgeqknagkigiyvklrdtqykekaaleearkslnpkersatka |
| | skydiitqiieandnvksekplvftgqpiaylsmndihsmlfslltdnaelkktpeevea |
| | klidgigkqineilskdtdtkilkkykdndlketdtdkitrdlardkeeieklileqkqr |
| | addynytsstkfnidksrkrkhllfnaekgkigvwlandikrfmfkeskskwkgyqhtel |
| | qklfayfdtsksdlelilsdmvmvkdypielidlvrksrtivdflnkylearlgyienvi |
| | trvknsigtpqfktvrkecfaflkesnytvasldkqierilsmplfiergfmdskptmle |
| | gksyqqhkedfadwfvhykensnyqnfydtevyeiitedkreqakvtkkikqqqkndvft |
| | lmmvnymleevlklpsndrlslnelyqtkeerivnkqvakdtgernknyiwnkvvdlqlc |
| | eglvridkvklkdignfrkyendsrvkefltyqsdivwsgylsnevdsnklyvierqldn |
| | yesirskellkevqeiecivynqvankeslkqsgnenfkqyvlqgllprgtdvremlils |
| | tdvkfkkeeimqlgqvreveqdlysliyirnkfahnqlpikeffdfcennyrpisdneyy |
| | aeyymeifrsikekyas (SEQ ID NO: 573) |
| Myroides | mkdilttdttekqnrfyshkiadkyffggyfnlasnniyevfeevnkrntfgklakrdng |
| odomtimimus | nlknyiihvfkdelsisdfekrvaifasyfpiletvdkksikernrtidltlsgrirqfr |
| CCUG 12901 | emlislvtavdqlrnfythyhhseivienkvldflnsslvstalhvkdkylktdktkefl |
| (NZ_H-1590834.1) | ketiaaeldilieaykkkqiekkntrfkankredilnaiyneafwsfindkdkdketvva |
| >WP_006261414.1 | kgadayfeknhhksndpdfalnisekgivyllsffltnkemdslkanitgfkgkvdresg |
| | nsikymatqrlysfhtyrglkqkirtseegvketllmqmidelskvpnvvyqhlsttqqn |
| | sfiedwneyykdyeddvetddlsrvihpvirkryedrfnyfairfldeffdfptlrfqvh |
| | lgdyvhdrrtkqlgkvesdriikekvtvfarlkdinsakanyfhsleeqdkeeldnkwtl |
| | fpnpsydfpkehtlqhqgeqknagkigiyvklrdtqykekaaleearkslnpkersatka |
| | skydiitqiieandnvksekplvftgqpiaylsmndihsmlfslltdnaelkktpeevea |
| | klidgigkqineilskdtdtkilkkykdndlketdtdkitrdlardkeeieklileqkqr |
| | addynytsstkfnidksrkrkhllfnaekgkigvwlandikrfmteefkskwkgyqhtel |
| | qklfayydtsksdldlilsdmvmvkdypielialvkksrtivdflnkylearlgymenvi |
| | trvknsigtpqfktvrkecftflkksnytvvsldkqverilsmplfiergfmddkptmle |
| | gksyqqhkekfadwfvhykensnyqnfydtevyeittedkrekakvtkkikqqqkndvft |
| | lmmvnymleevlklssndrlslnelyqtkeerivnkqvakdtgernknyiwnkvvdlqlc |
| | eglvridkvklkdignfrkyendsrvkefltyqsdivwsaylsnevdsnklyvierqldn |
| | yesirskellkevqeiecsvynqvankeslkqsgnenfkqyvlqglvpigmdvremlils |
| | tdvkfikeeiiqlgqageveqdlysliyirnkfahnqlpikeffdfcennyrsisdneyy |
| | aeyymeifrsikekyts (SEQ ID NO: 574) |
| Myroides | mkdilttdttekqnrfyshkiadkyffggyfnlasnniyevfeevnkrntfgklakrdng |
| odomtimimus | nlknyiihvfkdelsisdfekrvaifasyfpiletvdkksikernrtidltlsgrirqfr |
| CCUG 12901 | emlislvtavdqlrnfythyhhseivienkvldflnsslvstalhvkdkylktdktkefl |
| (AGED01000033.1) | ketiaaeldilieaykkkqiekkntrfkankredilnaiyneafwsfindkdkdketvva |
| >EHO08761.1 | kgadayfeknhhksndpdfalnisekgivyllsffltnkemdslkanitgfkgkvdresg |
| | nsikymatqrlysfhtyrglkqkirtseegvketllmqmidelskvpnvvyqhlsttqqn |
| | sfiedwneyykdyeddvetddlsrvihpvirkryedrfnyfairfldeffdfptlrfqvh |
| | lgdyvhdrrtkqlgkvesdriikekvtvfarlkdinsakanyfhsleeqdkeeldnkwtl |
| | fpnpsydfpkehtlqhqgeqknagkigiyvklrdtqykekaaleearkslnpkersatka |
| | skydiitqiieandnvksekplvftgqpiaylsmndihsmlfslltdnaelkktpeevea |
| | klidgigkqineilskdtdtkilkkykdndlketdtdkitrdlardkeeieklileqkqr |
| | addynytsstkfnidksrkrkhllfnaekgkigvwlandikrfmteefkskwkgyqhtel |
| | qklfayydtsksdldlilsdmvmvkdypielialvkksrtivdflnkylearlgymenvi |
| | trvknsigtpqfktvrkecftflkksnytvvsldkqverilsmplfiergfmddkptmle |
| | gksyqqhkekfadwfvhykensnyqnfydtevyeittedkrekakvtkkikqqqkndvft |
| | lmmvnymleevlklssndrlslnelyqtkeerivnkqvakdtgernknyiwnkvvdlqlc |
| | eglvridkvklkdignfrkyendsrvkefltyqsdivwsaylsnevdsnklyvierqldn |
| | yesirskellkevqeiecsvynqvankeslkqsgnenfkqyvlqglvpigmdvremlils |
| | tdvkfikeeiiqlgqageveqdlysliyirnkfahnqlpikeffdfcennyrsisdneyy |
| | aeyymeifrsikekyts (SEQ ID NO: 575) |
| Myroides | mkdilttdttekqnrfyshkiadkyffggyfnlasnniyevfeevnkrntfgklakrdng |
| odomtimimus | nlknyiihvfkdelsisdfekrvaifasyfpiletvdkksikernrtidltlsgrirqfr |
| (NZ_CP013690.1) | emlislvtavdqlrnfythyhhsdivienkvldflnssfvstalhvkdkylktdktkefl |
| >WP_058700060.1 | ketiaaeldilieaykkkqiekkntrfkankredilnaiyneafwsfindkdkdkdketv |
| | vakgadayfeknhhksndpdfalnisekgivyllsffltnkemdslkanitgfkgkvdre |
| | sgnsikymatqrlysfhtyrglkqkirtseegvketllmqmidelskvpnvvyqhlsttq |
| | qnsfiedwneyykdyeddvetddlsrvthpvirkryedrfnyfairfldeffdfptlrfq |
| | vhlgdyvhdrrtkqlgkvesdriikekvtvfarlkdinsakasyfhsleeqdkeeldnkw |
| | tlfpnpsydfpkehtlqhqgeqknagkigiyvklrdtqykekaaleearkslnpkersat |
| | kaskydiitqiieandnvksekplvftgqpiaylsmndihsmlfslltdnaelkktpeev |
| | eaklidgigkqineilskdtdtkilkkykdndlketdtdkitrdlardkeeieklileqk |
| | qraddynytsstkfnidksrkrkhllfnaekgkigvwlandikrfmfkeskskwkgyqhi |
| | elqklfayfdtsksdlelilsnmvmvkdypielidlvkksrtivdflnkylearleyien |
| | vitrvknsigtpqfktvrkecftflkksnytvvsldkqverilsmplfiergfmddkptm |
| | legksykqhkekfadwfvhykensnyqnfydtevyeittedkrekakvtkkikqqqkndv |
| | ftlmmvnymleevlklssndrlslnelyqtkeerivnkqvakdtgernknyiwnkvvdlq |
| | lcdglvhidnvklkdignfrkyendsrvkefltyqsdivwsaylsnevdsnklyvierql |
| | dnyesirskellkevqeiecsvynqvankeslkqsgnenfkqyvlqgllpigmdvremli |
| | lstdvkfkkeeiiqlgqageveqdlysliyirnkfahnqlpikeffdfcennyrsisdne |
| | yyaeyymeifrsikekyan (SEQ ID NO: 576) |
| Bergeyella | menktslgnniyynpfkpqdksyfagyfnaamentdsvfrelgkrlkgkeytsenffdai |
| zoohelcum | fkenislveyeryvkllsdyfpmarlldkkevpikerkenfkknfkgiikavrdlrnfyt |
| ATCC 43767 | hkehgeveitdeifgvldemlkstvltvkkkkvktdktkeilkksiekqldilcqkkley |
| (AGYA01000037.1) | lrdtarkieekrrnqrergekelvapfkysdkrddliaaiyndafdvyidkkkdslkess |
| >EKB54193.1 | kakyntksdpqqeegdlkipiskngvvfllslfltkqeihafkskiagfkatvideatvs |
| | eatvshgknsicfmatheifshlaykklkrkvrtaeinygeaenaeqlsvyaketlmmqm |
| | ldelskvpdvvyqnlsedvqktfiedwneylkenngdvgtmeeeqvihpvirkryedkfn |
| | yfairfldefaqfptlrfqvhlgnylhdsrpkenlisdrrikekitvfgrlselehkkal |
| | fikntetnedrehyweifpnpnydfpkenisvndkdfpiagsildrekqpvagkigikvk |
| | llnqqyvsevdkavkahqlkqrkaskpsigniieeivpinesnpkeaivfggqptaylsm |
| | ndihsilyeffdkwekkkeklekkgekelrkeigkelekkivgkiqaqiqqiidkdtnak |
| | ilkpyqdgnstaidkeklikdlkqeqnilqklkdeqtvrekeyndfiayqdknreinkvr |
| | drnhkqylkdnlkrkypeaparkevlyyrekgkvavwlandikrfmptdfknewkgeqhs |
| | llqkslayyeqckeelknllpekvfqhlpfklggyfqqkylyqfytcyldkrleyisglv |
| | qqaenfksenkvfkkvenecfkflkkqnythkeldarvqsilgypiflergfmdekptii |
| | kgktfkgnealfadwfryykeyqnfqtfydtenyplvelekkqadrkrktkiyqqkkndv |
| | ftllmakhifksvfkqdsidqfsledlyqsreerlgngerarqtgerntnyiwnktvdlk |
| | lcdgkitvenvklknvgdfikyeydqrvqaflkyeeniewqaflikeskeeenypyvver |
| | eiegyekvrreellkevhlieeyilekvkdkeilkkgdnqnfkyyilngllkqlknedve |
| | sykvfnlntepedvninqlkqeatdlegkafvltyirnkfahnqlpkkefwdycqekygk |
| | iekektyaeyfaevfkkekealik (SEQ ID NO: 577) |
| Capnocytophaga | menktslgnniyynpfkpqdksyfagylnaamenidsvfrelgkrlkgkeytsenffdai |
| cynodegmi | fkenislveyeryvkllsdyfpmarlldkkevpikerkenfkknfrgiikavrdlrnfyt |
| (NZ_CDOD01000002.1) | hkehgeveitdeifgvldemlkstvltvkkkkiktdktkeilkksiekqldilcqkkley |
| >WP_041989581.1 | lkdtarkieekrrnqrergekklvprfeysdrrddliaaiyndafdvyidkkkdslkess |
| | ktkyntesypqqeegdlkipiskngvvfllslflskqevhafkskiagfkatvideatvs |
| | hrknsicfmatheifshlaykklkrkvrtaeinyseaenaeqlsiyaketlmmqmldels |
| | kvpdvvyqnlsedvqktfiedwneylkenngdvgtmeeeqvihpvirkryedkfnyfair |
| | fldefaqfptlrfqvhlgnylhdsrpkehlisdrrikekitvfgrlselehkkalfiknt |
| | etnedrkhywevfpnpnydfpkenisvndkdfpiagsildrekqptagkigikvnllnqk |
| | yisevdkavkahqlkqrnnkpsigniieeivpingsnpkeiivfggqptaylsmndihsi |
| | lyeffdkwekkkeklekkgekelrkeigkeleekivgkiqtqiqqiidkdinakilkpyq |
| | dddstaidkeklikdlkqeqkilqklkneqtarekeyqeciayqeesrkikrsdksrqky |
| | lrnqlkrkypevptrkeilyyqekgkvavwlandikrfmptdfknewkgeqhsllqksla |
| | yyeqckeelknllpqqkvfkhlpfelgghfqqkylyqfytryldkrlehisglvqqaenf |
| | knenkvfkkvenecfkflkkqnythkgldaqaqsvlgypiflergfmdekptiikgktfk |
| | gneslftdwfryykeyqnfqtfydtenyplvelekkqadrkretkiyqqkkndvftllma |
| | khifksvfkqdsidrfsledlyqsreerlengekakqtgerntnyiwnktvdlnlcdgkv |
| | tvenvklknvgnfikyeydqrvqtflkyeenikwqaflikeskeeenypyivereieqye |
| | kvrreellkevhlieeyilekvkdkeilkkgdnqnfkyyilngllkqlknedvesykvfn |
| | lntkpedvninqlkqeatdleqkafvltyirnkfahnqlpkkefwdycqekygkiekekt |
| | yaeyfaevfkrekealmk (SEQ ID NO: 578) |
| Bergeyella | menktslgnniyynpfkpqdksyfagyfnaamentdsvfrelgkrlkgkeytsenffdai |
| zoohelcum | fkenislveyeryvkllsdyfpmarlldkkevpikerkenfkknfkgiikavrdlrnfyt |
| ATCC 43767 | hkehgeveitdeifgvldemlkstvltvkkkkvktdktkeilkksiekqldilcqkkley |
| (NZ_JH932293.1) | lrdtarkieekrrnqrergekelvapfkysdkrddliaaiyndafdvyidkkkdslkess |
| >WP_002664492.1 | kakyntksdpqqeegdlkipiskngvvfllslfltkqeihafkskiagfkatvideatvs |
| | eatvshgknsicfmatheifshlaykklkrkvrtaeinygeaenaeqlsvyaketlmmqm |
| | ldelskvpdvvyqnlsedvqktfiedwneylkenngdvgtmeeeqvihpvirkryedkfn |
| | yfairfldefaqfptlrfqvhlgnylhdsrpkenlisdrrikekitvfgrlselehkkal |
| | fikntetnedrehyweifpnpnydfpkenisvndkdfpiagsildrekqpvagkigikvk |
| | llnqqyvsevdkavkahqlkqrkaskpsigniieeivpinesnpkeaivfggqptaylsm |
| | ndihsilyeffdkwekkkeklekkgekelrkeigkelekkivgkiqaqiqqiidkdtnak |
| | ilkpyqdgnstaidkeklikdlkqeqnilqklkdeqtvrekeyndfiayqdknreinkvr |
| | drnhkqylkdnlkrkypeaparkevlyyrekgkvavwlandikrfmptdfknewkgeqhs |
| | llqkslayyeqckeelknllpekvfqhlpfklggyfqqkylyqfytcyldkrleyisglv |
| | qqaenfksenkvfkkvenecfkflkkqnythkeldarvqsilgypiflergfmdekptii |
| | kgktfkgnealfadwfryykeyqnfqtfydtenyplvelekkqadrkrktkiyqqkkndv |
| | ftllmakhifksvfkqdsidqfsledlyqsreerlgngerarqtgerntnyiwnktvdlk |
| | lcdgkitvenvklknvgdfikyeydqrvqaflkyeeniewqaflikeskeeenypyvver |
| | eiegyekvrreellkevhlieeyilekvkdkeilkkgdnqnfkyyilngllkqlknedve |
| | sykvfnlntepedvninqlkqeatdlegkafvltyirnkfahnqlpkkefwdycqekygk |
| | iekektyaeyfaevfkkekealik (SEQ ID NO: 579) |
| Flavobacterium | mdnnitvektelglgitynhdkvedkhyfggffnlaqnnidlvagefkkrlliqgkdsin |
| sp. 316 | ifanyfsdqcsitnlergikilaeyfpvvsyidldeknksksirehlillletinnlrny |
| (NZ_JYGZ01000003.1) | ythyyhkkiiidgslfplldtillkvvleikkkklkedktkqllkkglekemtilfnlmk |
| >NV_P045968377.1 | aegkekkikgwnidenikgavinrafshllyndelsdyrkskyntedetlkdtltesgil |
| | fllsfflnkkeqeqlkanikgykgkiasipdeeitlknnslrnmathwtyshltykglkh |
| | riktdheketllvnmvdylskvpheiyqnlseqnkslfledineymrdneenhdsseasr |
| | vihpvirkryenkfayfairfldefaefptlrfmvnvgnyihdnrkkdiggtslitnrti |
| | kqqinvfgniteihkkkndyfekeenkektlewelfpnpsyhfqkenipifidleksket |
| | ndlakeyakekkkifgssrkkqqntakknretiinlvfdkyktsdrktvtfeqptallsf |
| | nelnsflyaflvenktgkelekiiiekianqyqilkncsstvdktndnipksikkivntt |
| | tdsfyfegkkidieklekditieiektnekletikeneesagnykrnerntqkrklyrky |
| | vfftneigieatwitndilrfldnkenwkgyqhselqkfisqydnykkealgllesewnl |
| | esdaffgqnlkrmfqsnstfetfykkyldnrkntletylsaienlktmtdvrpkvlkkkw |
| | telfrffdkkiyllstietkinelitkpinlsrgifeekptfingknpnkennqhlfanw |
| | fiyakkqtilqdfynlpleqpkaitnlkkhkyklersinnlkiediyikqmvdflyqklf |
| | eqsfigslqdlytskekreiekgkakneqtpdesfiwkkgveinthngriiaktkikdig |
| | kfknlltdnkiahlisyddriwdfslnndgditkklysintelesyetirrekllkqiqq |
| | feqfllegeteysaerkhpekfekdcnpnfkkyiiegvinkiipnheieeieilkskedv |
| | fkinfsdililnndnikkgyllimirnkfahnglidknlfnfslqlysknenenfseyln |
| | kvcqniiqefkeklk (SEQ ID NO: 580) |
| Psychroflexus | mesiiglglsfnpyktadkhyfgsflnlvennlnavfaefkerisykakdenissliekh |
| torquis | fidnmsivdyekkisilngylpiidflddelennlntrvknfkknfiilaeaieklrdyy |
| ATCC 700755 | thfyhdpitfednkepllelldevllktildvkkkylktdktkeilkdslreemdllvir |
| (NC_018721.1) | ktdelrekkktnpkightdssqiknsifndafqgllyedkgnnkktqvshraktrinpkd |
| >WP_015024765.1 | ihkqeerdfeiplstsglvflmslflskkeiedfksnikgfkgkvvkdenhnslkymath |
| | rvysilafkglkyriktdtfsketlmmqmidelskvpdcvyqnlsetkqkdfiedwneyf |
| | kdneentenlensrvvhpvirkryedkfnyfairfldefanfktlkfqvfmgyyihdqrt |
| | ktigttnittertvkekinvfgklskmdnlkkhffsqlsddentdweffpnpsynfltqa |
| | dnspannipiylelknqqiikekdaikaevnqtqnrnpnkpskrdllnkilktyedfhqg |
| | dptailslneipallhlflvkpnnktgqqieniirikiekqfkainhpsknnkgipkslf |
| | adtnvrvnaiklkkdleaeldmlnkkhiafkenqkassnydkllkehqftpknkrpelrk |
| | yvfyksekgeeatwlandikrfmpkdfktkwkgcqhselqrklafydrhtkqdikellsg |
| | cefdhslldinayfqkdnfedffskylenrietlegvlkklhdfkneptplkgvfkncfk |
| | flkrqnyvtespeiikkrilakptflprgvfderptmkkgknplkdknefaewfveylen |
| | kdyqkfynaeeyrmrdadfkknavikkqklkdfytlqmvnyllkevfgkdemnlqlself |
| | qtrgerlklqgiakkqmnketgdssentrnqtyiwnkdvpvsffngkvtidkvklknigk |
| | ykryerdervktfigyevdekwmmylphnwkdrysvkpinvidlqiqeyeeirshellke |
| | iqnlegyiydhttdknillqdgnpnfkmyvinglligikqvnipdfivlkqntnfdkidf |
| | tgiascselekktiiliairnkfahnqlpnkmiydlaneflkieknetyanyylkvlkkm |
| | isdla (SEQ ID NO: 581) |
| Flavobacterium | mssknesynkqktfnhykqedkyffggflnnaddnlrqvgkefktrinfnhnnnelasvf |
| columnare | kdyfnkeksvakrehalnllsnyfpvleriqkhtnhnfeqtreifellldtikklrdyyt |
| ATCC 49512 | hhyhkpitinpkiydflddtlldvlitikkkkvkndtsrellkeklrpeltqlknqkree |
| (NC_016510.2) | likkgkklleenlenavfnhclrpfleenktddkqnktvslrkyrkskpneetsitltqs |
| >WP_014165541.1 | glvflmsfflhrkefqvftsglegfkakvntikeeeislnknnivymithwsysyynfkg |
| | lkhriktdqgvstleqnntthsltntntkealltqivdylskvpneiyetlsekqqkefe |
| | edineymrenpenedstfssivshkvirkryenkfnyfamrfldeyaelptlrfmvnfgd |
| | yikdrqkkilesiqfdseriikkeihlfeklslvteykknvylketsnidlsrfplfpnp |
| | syvmannnipfyidsrsnnldeylnqkkkaqsqnkkrnitfekynkeqskdaiiamlqke |
| | igvkdlqqrstigllscnelpsmlyevivkdikgaelenkiaqkireqyqsirdftldsp |
| | qkdnipttliktintdssvtfenqpidiprlknaigkeltltqekllnvkeheievdnyn |
| | rnkntykfknqpknkvddkklqrkyvfyrneirgeanwlasdlihfmknkslwkgymhne |
| | lqsflaffedkkndcialletvfnlkedciltkglknlflkhgnfidfykeylklkedfl |
| | ntestflengliglppkilkkelskrfkyifivfqkrqfiikeleekknnlyadainlsr |
| | gifdekptmipfkkpnpdefaswfvasyqynnyqsfyeltpdiverdkkkkyknlraink |
| | vkiqdyylklmvdtlyqdlfnqpldkslsdfyvskaerekikadakayqkrndsslwnkv |
| | ihlslqnnritanpklkdigkykralqdekiatlltyddrtwtyalqkpekenendykel |
| | hytalnmelqeyekvrskellkqvqelekqileeytdflstqihpadferegnpnfkkyl |
| | ahsileneddldklpekveamreldetitnpiikkaivliiirnkmahnqyppkfiydla |
| | nrfvpkkeeeyfatyfnrvfetitkelwenkekkdktqv (SEQ ID NO: 582) |
| Flavobacterium | mssknesynkqktfnhykqedkyffggflnnaddnlrqvgkefktrinfnhnnnelasvf |
| columnare | kdyfnkeksvakrehalnllsnyfpvleriqkhtnhnfeqtreifellldtikklrdyyt |
| (NZ_CP013992.1) | hhyhkpitinpkvydflddtlldvlitikkkkvkndtsrellkekfrpeltqlknqkree |
| >WP_060381855.1 | likkgkklleenlenavfnhclrpfleenktddkqnktvslrkyrkskpneetsitltqs |
| | glvflisfflhrkefqvftsglegfkakvntikeeeislnknnivymithwsysyynfkg |
| | lkhriktdqgvstleqnntthsltntntkealltqivdylskvpneiyetlsekqqkefe |
| | edineymrenpenedstfssivshkvirkryenkfnyfamrfldeyaelptlrfmvnfgd |
| | yikdrqkkilesiqfdseriikkeihlfeklglvteykknvylketsnidlsrfplfpsp |
| | syvmannnipfyidsrsnnldeylnqkkkaqsqnrkrnitfekynkeqskdaiiamlqke |
| | igvkdlqqrstigllscnelpsmlyevivkdikgaelenkiaqkireqyqsirdftldsp |
| | qkdnipttltktistdtsvtfenqpidiprlknalqkeltltqekllnvkqheievdnyn |
| | rnkntykfknqpkdkvddnklqrkyvfyrneiggeanwlasdlihfmknkslwkgymhne |
| | lqsflaffedkkndcialletvfnlkedciltkdlknlflkhgnfidfykeylklkedfl |
| | ntestflengfiglppkilkkelskrinyifivfqkrqfiikeleekknnlyadainlsr |
| | gifdekptmipfkkpnpdefaswfvasyqynnyqsfyeltpdkiendkkkkyknlraink |
| | vkiqdyylklmvdtlyqdlfnqpldkslsdfyvsktdrekikadakayqkrndsflwnkv |
| | ihlslqnnritanpklkdigkykralqdekiatlltyddrtwtyalqkpekenendykel |
| | hytalnmelqeyekvrskkllkqvqelekqildkfydfsnnathpedleiedkkgkrhpn |
| | fklyitkallkneseiinlenidieilikyydynteklkekiknmdedekakivntkeny |
| | nkitnvlikkalvliiirnkmahnqyppkfiydlatrfvpkkeeeyfacyfnrvfetitt |
| | elwenkkkakeiv (SEQ ID NO: 583) |
| Flavobacterium | mssknesynkqktfnhykqedkyffggflnnaddnlrqvgkefktrinfnhnnnelasvf |
| columnare | kdyfnkeksvakrehalnllsnyfpvleriqkhtnhnfeqtreifellldtikklrdyyt |
| (NZ_CP015107.1) | hhyhkpitinpkiydflddtlldvlitikkkkvkndtsrellkeklrpeltqlknqkree |
| >WP_063744070.1 | likkgkklleenlenavfnhclrpfleenktddkqnktvslrkyrkskpneetsitltqs |
| | glvflmsfflhrkefqvftsglegfkakvntikeekislnknnivymithwsysyynfkg |
| | lkhriktdqgvstleqnntthsltntntkealltqivdylskvpneiyetlsekqqkefe |
| | edineymrenpenedstfssivshkvirkryenkfnyfamrfldeyaelptlrfmvnfgd |
| | yikdrqkkilesiqfdseriikkeihlfeklglvteykknvylketsnidlsrfplfpsp |
| | syvmannnipfyidsrsnnldeylnqkkkaqsqnrkrnitfekynkeqskdaiiamlqke |
| | igvkdlqqrstigllscnelpsmlyevivkdikgaelenkiaqkireqyqsirdftlnsp |
| | qkdnipttliktistdtsvtfenqpidiprlknaigkelaltqekllnvkqheievnnyn |
| | rnkntykfknqpkdkvddnklqrkyvfyrneiggeanwlasdlihfmknkslwkgymhne |
| | lqsflaffedkkndcialletvfnlkedciltkdlknlflkhgnfidfykeylklkedfl |
| | ntestflengfiglppkilkkelskrinyifivfqkrqfiikeleekknnlyadainlsr |
| | gifdekptmipfkkpnpdefaswfvasyqynnyqsfyeltpdkiendkkkkyknlraink |
| | vkiqdyylklmvdtlyqdlfnqpldkslsdfyvsktdrekikadakayqkrndsflwnkv |
| | ihlslqnnritanpklkdigkykralqdekiatlltyddrtwtyalqkpekenendykel |
| | hytalnmelqeyekvrskkllkqvqelekqildkfydfsnnathpedleiedkkgkrhpn |
| | fklyitkallkneseiinlenidieilikyydynteklkekiknmdedekakivntkeny |
| | nkitnvlikkalvliiirnkmahnqyppkfiydlatrfvpkkeeeyfacyfnrvfetitt |
| | elwenkkkakeiv (SEQ ID NO: 584) |
| Flavobacterium | mssknesynkqktfnhykqedkyffggflnnaddnlrqvgkefktrinfnhnnnelasvf |
| columnare | kdyfnkeksvakrehalnllsnyfpvleriqkhtnhnfeqtreifellldtikklrdyyt |
| (NZ_CP016277.1) | hhyhkpitinpkiydflddtlldvlitikkkkvkndtsrellkeklrpeltqlknqkree |
| >WP_065213424.1 | likkgkklleenlenavfnhclipfleenktddkqnktvslrkyrkskpneetsitltqs |
| | glvflmsfflhrkefqvftsglerfkakvntikeeeislnknnivymithwsysyynfkg |
| | lkhriktdqgvstleqnntthsltntntkealltqivdylskvpneiyetlsekqqkefe |
| | edineymrenpenedstfssivshkvirkryenkfnyfamrfldeyaelptlrfmvnfgd |
| | yikdrqkkilesiqfdseriikkeihlfeklslvteykknvylketsnidlsrfplfpnp |
| | syvmannnipfyidsrsnnldeylnqkkkaqsqnkkrnitfekynkeqskdaiiamlqke |
| | igvkdlqqrstigllscnelpsmlyevivkdikgaelenkiaqkireqyqsirdftldsp |
| | qkdnipttliktintdssvtfenqpidiprlknalqkeltltqekllnvkeheievdnyn |
| | rnkntykfknqpknkvddkklqrkyvfyrneirgeanwlasdlihfmknkslwkgymhne |
| | lqsflaffedkkndcialletvfnlkedciltkglknlflkhgnfidfykeylklkedfl |
| | stestflengfiglppkilkkelskrlkyifivfqkrqfiikeleekknnlyadainlsr |
| | gifdekptmipfkkpnpdefaswfvasyqynnyqsfyeltpdiverdkkkkyknlraink |
| | vkiqdyylklmvdtlyqdlfnqpldkslsdfyvskaerekikadakayqklndsslwnkv |
| | ihlslqnnritanpklkdigkykralqdekiatlltydartwtyalqkpekenendykel |
| | hytalnmelqeyekvrskellkqvqelekkildkfydfsnnashpedleiedkkgkrhpn |
| | fklyitkallkneseiinlenidieillkyydynteelkekiknmdedekakiintkeny |
| | nkitnvlikkalvliiirnkmahnqyppkfiydlanrfvpkkeeeyfatyfnrvfetitk |
| | elwenkekkdktqv (SEQ ID NO: 585) |
| Chryseobacterium | metqtighgiaydhskiqdkhffggflnlaennikavlkafsekfnvgnvdvkqfadvsl |
| sp. YR477 | kdnlpdndfqkrvsflkmyfpvvdfinipnnrakfrsdlttlfksvdqlrnfythyyhkp |
| (NZ_KN549099.1) | ldfdaslfillddifartakevrdqkmkddktrqllskslseelqkgyelqlerlkelnr |
| >WP_047431796.1 | lgkkvnihdqlgikngvinnafnhliykdgesfktkltyssaltsfesaengieisqsgl |
| | lfllsmflkrkeiedlknrnkgfkakvvidedgkvnglkfmathwvfsylcfkglkskls |
| | tefheetlliqiidelskvpdelycafdketrdkfiedineyvkeghqdfsledakvihp |
| | virkryenkfnyfairfldefvkfpslrfqvhvgnyvhdrriknidgttfetervvkdri |
| | kvfgrlseissykagylssysdkhdetgweifpnpsyvfinnnipihisvdtsfkkeiad |
| | fkklrraqvpdelkirgaekkrkfeitqmigsksvinqeepiallslneipallyeilin |
| | gkepaeieriikdklnerqdviknynpenwlpasqisrrlrsnkgeriintdkllqlvtk |
| | ellvteqklkiisdnrealkqkkegkyirkfiftnselgreaiwladdikrfmpadvrke |
| | wkgyqhsqlqqslafynsrpkealailesswnlkdekiiwnewilksftqnkffdafyne |
| | ylkgrkkyfaflsehivqytsnaknlqkfikqqmpkdlfekrhyliedlqteknkilskp |
| | fifprgifdkkptfikgvkvedspesfanwyqygyqkdhqfqkfydwkrdysdvflehlg |
| | kpfinngdrrtlgmeelkeriiikqdlkikkikiqdlflrliaenlfqkvfkysaklpls |
| | dfyltqeermekenmaalqnvreegdkspniikdnfiwskmipykkgqiienavklkdig |
| | klnvlslddkvqtllsyddakpwskialenefsigensyevirreklfkeiqqfeseilf |
| | rsgwdginhpaqlednrnpkfkmyivngilrksaglysqgediwfeynadfnnldadvle |
| | tkselvqlaflvtairnkfahnqlpakefyfyirakygfadepsvalvylnftkyainef |
| | kkvmi (SEQ ID NO: 586) |
| Riemerella | mekpllpnvytlkhkffwgaflniarhnafitichineqlglktpsnddkivdvvcetwn |
| anatipestifer | nilnndhdllkksqltelilkhfpfltamcyhppkkegkkkghqkeqqkekeseaqsqae |
| ATCC 11845 = DSM | alnpskliealeilvnqlhslrnyyshykhkkpdaekdifkhlykafdaslrmvkedyka |
| 15868 | hftvnitrdfahlnrkgknkqdnpdfnryrfekdgfftesgllfftnlfldkrdaywmlk |
| (NC_014738.1) | kvsgfkashkgrekmttevfcrsrillpklrlesrydhnqmlldmlselsrcpkllyekl |
| >WP_004919755A | seenkkhfqveadgfldeieeeqnpfkdtlirhqdrfpyfalryldlnesfksirfqvdl |
| | gtyhyciydkkigdeqekrhltrtllsfgrlqdfteinrpqewkaltkdldyketsnqpf |
| | iskttphyhitdnkigfrlgtskelypsleikdganriakypynsgfvahafisvhellp |
| | lmfyqhltgksedllketvrhiqriykdfeeerintiedlekanqgrlplgafpkqmlgl |
| | lqnkqpdlsekakikiekliaetkllshrintklksspklgkrrekliktgvladwlvkd |
| | fmrfqpvaydaqnqpiksskanstefwfirralalyggeknrlegyfkqtnligntnphp |
| | flnkfnwkacrnlvdfyqqylegrekfleaiknqpwepyqyclllkipkenrknlvkgwe |
| | qggislprglfteairetlsedlmlskpirkeikkhgrvgfisraitlyfkekyqdkhqs |
| | fynlsykleakapllkreehyeywqqnkpqsptesqrlelhtsdrwkdyllykrwqhlek |
| | klrlyrnqdvmlwlmtleltknhfkelnlnyhqlklenlavnvqeadaklnpinqtlpmv |
| | lpvkvypatafgevqyhktpirtvyireehtkalkmgnfkalvkdrringlfsfikeend |
| | tqkhpisqlrlrreleiyqslrvdafketlsleekllnkhtslsslenefralleewkke |
| | yaassmvtdehiafiasvrnafchnqypfykealhapiplftvaqptteekdglgiaeal |
| | lkvlreyceivksqi (SEQ ID NO: 587) |
| Riemerella | mffsfhnaqrvifkhlykafdaslrmvkedykahftvnitrdfahlnrkgknkqdnpdfn |
| anatipestifer | ryrfekdgfftesgllfftnlfldkrdaywmlkkvsgfkashkgrekmttevfcrsrill |
| RA-CH-2 | pklrlesrydhnqmlldmlselsrcpkllyeklseenkkhfqveadgfldeieeeqnpfk |
| (NC_020125.1) | dtlirhqdrfpyfalryldlnesfksirfqvdlgtyhyciydkkigdeqekrhltrtlls |
| >WP_015345620A | fgrlqdfteinrpqewkaltkdldyketsnqpfiskttphyhitdnkigfrlgtskelyp |
| | sleikdganriakypynsgfvahafisvhellplmfyqhltgksedllketvrhiqriyk |
| | dfeeerintiedlekanqgrlplgafpkwalgllqnkqpdlsekakikiekliaetklls |
| | hrintklksspklgkrrekliktgvladwlvkdfmrfqpvaydaqnqpiksskanstefw |
| | firralalyggeknrlegyfkqtnligntnphpflnkfnwkacrnlvdfyqqylegrekf |
| | leaikhqpwepyqyclllkvpkenrknlvkgweqggislprglfteairetlskdltlsk |
| | pirkeikkhgrvgfisraitlyfkekyqdkhqsfynlsykleakapllkkeehyeywqqn |
| | kpqsptesqrlelhtsdrwkdyllykrwqhlekklrlyrnqdimlwlmtleltknhfkel |
| | nlnyhqlklenlavnvqeadaklnpinqtlpmvlpvkvypttafgevqyhetpirtvyir |
| | eeqtkalkmgnfkalvkdrringlfsfikeendtqkhpisqlrlrreleiyqslrvdafk |
| | etlsleekllnkhaslsslenefrtlleewkkkyaassmvtdkhiafiasvrnafchnqy |
| | pfyketlhapillftvaqptteekdglgiaeallkvlreyceivksqi (SEQ ID NO: |
| | 588) |
| Riemerella | mffsfhnaqrvifkhlykafdaslrmvkedykahftvnitrdfahlnrkgknkqdnpdfn |
| anatipestifer | ryrfekdgfftesgllfftnlfldkrdaywmlkkvsgfkashkgrekmttevfcrsrill |
| (NZ_CP007504.1) | pklrlesrydhnqmlldmlselsrcpkllyeklseenkkhfqveadgfldeieeeqnpfk |
| >WP_049354263.1 | dtlirhqdrfpyfalryldlnesfksirfqvdlgtyhyciydkkigdeqekrhltrtlls |
| | fgrlqdfteinrpqewkaltkdldyketsnqpfiskttphyhitdnkigfrlgtskelyp |
| | sleikdganriakypynsgfvahafisvhellplmfyqhltgksedllketvrhiqriyk |
| | dfeeerintiedlekanqgrlplgafpkwalgllqnkqpdlsekakikiekliaetklls |
| | hrintklksspklgkrrekliktgvladwlvkdfmrfqpvaydaqnqpiksskanstefw |
| | firralalyggeknrlegyfkqtnligntnphpflnkfnwkacrnlvdfyqqylegrekf |
| | leaiknqpwepyqyclllkipkenrknlvkgweqggislprglfteairetlsedlmlsk |
| | pirkeikkhgrvgfisraitlyfkekyqdkhqsfynlsykleakapllkreehyeywqqn |
| | kpqsptesqrlelhtsdrwkdyllykrwqhlekklrlyrnqdvmlwlmtleltknhfkel |
| | nlnyhqlklenlavnvqeadaklnpinqtlpmvlpvkvypatafgevqyhktpirtvyir |
| | eehtkalkmgnfkalvkdrringlfsfikeendtqkhpisqlrlrreleiyqslrvdafk |
| | etlsleekllnkhtslsslenefralleewkkeyaassmvtdehiafiasvrnafchnqy |
| | pfykealhapiplftvaqptteekdglgiaeallkvlreyceivksqi (SEQ ID NO: |
| | 589) |
| Riemerella | mffsfhnaqrvifkhlykafdaslrmvkedykahftvnitrdfahlnrkgknkqdnpdfn |
| anatipestifer | ryrfekdgfftesgllfftnlfldkrdaywmlkkvsgfkashkqsekmttevfcrsrill |
| (NZ_LUDU01000012.1) | pklrlesrydhnqmlldmlselsrcpkllyeklsekdkkcfqveadgfldeieeeqnpfk |
| >WP_061710138A | dtlirhqdrfpyfalryldlnesfksirfqvdlgtyhyciydkkigyegekrhltrtlln |
| | fgrlqdfteinrpqewkaltkdldynetsnqpfiskttphyhitdnkigfrlrtskelyp |
| | slevkdganriakypynsdfvahafisisvhellplmfyqhltgksedllketvrhiqri |
| | ykdfeeerintiedlekanqgrlplgafpkwalgllqnkqpdlsekakikiekliaetkl |
| | lshrintklksspklgkrrekliktgvladwlvkdfmrfqpvvydaqnqpiksskanste |
| | srlirralalyggeknrlegyfkqtnligntnphpflnkfnwkacrnlvdfyqqylegre |
| | kfleaikhqpwepyqyclllkvpkenrknlvkgweqggislprglfteairetlskdltl |
| | skpirkeikkhgrvgfisraitlyfkekyqdkhqsfynlsykleakapllkkeehyeywq |
| | qnkpqsptesqrlelhtsdrwkdyllykrwqhlekklrlyrnqdimlwlmtleltknhfk |
| | elnlnyhqlklenlavnvqeadaklnpinqtlpmvlpvkvypttafgevqyhetpirtvy |
| | ireeqtkalkmgnfkalvkdrhinglfsfikeendtqkhpisqlrlrreleiyqslrvda |
| | fketlsleekllnkhaslsslenefrtlleewkkkyaassmvtdkhiafiasvrnafchn |
| | qypfyketlhapillftvaqptteekdglgiaeallrvlreyceivksqi (SEQ ID |
| | NO: 590) |
| Riemerella | mekplppnvytlkhkffwgaflniarhnafitichineqlglttppnddkiadvvcgtwn |
| anatipestifer | nilnndhdllkksqltelilkhfpflaamcyhppkkegkkkgsqkeqqkekeneaqsqae |
| (NZ_LUDI01000010.1) | alnpselikvlktivkqlrtlrnyyshhshkkpdaekdifkhlykafdaslrmvkedyka |
| >WP_064970887.1 | hftvnitqdfahlnrkgknkqdnpdfdryrfekdgfftesgllfftnlfldkrdaywmlk |
| | kvsgfkashkgsekmttevfcrsrillpklrlesrydhnqmlldmlselsrypkllyekl |
| | seedkkrfqveadgfldeieeeqnpfkdtlirhqdrfpyfalryldlnesfksirfqvdl |
| | gtyhyciydkkigdeqekrhltrtllsfgrlqdfteinrpqewkaltkdldyketskqpf |
| | iskttphyhitdnkigfrlgtskelypslevkdganriaqypynsdfvahafisvhellp |
| | lmfyqhltgksedllketvrhiqriykdfeeerintiedlekanqgrlplgafpkqmlgl |
| | lqnkqpdlsekakikiekliaetkllshrintklksspklgkrrekliktgvladwlvkd |
| | fmrfqpvaydaqnqpiesskanstefqliqralalyggeknrlegyfkqtnligntnphp |
| | flnkfnwkacrnlvdfyqqylegrekfleaiknqpwepyqyclllkipkenrknlvkgwe |
| | qggislprglfteairetlskdltlskpirkeikkhgrvgfisraitlyfrekyqddhqs |
| | fydlpykleakasplpkkehyeywqqnkpqsptelqrlelhtsdrwkdyllykrwqhlek |
| | klrlyrnqdvmlwlmtleltknhfkelnlnyhqlklenlavnvqeadaklnpinqtlpmv |
| | lpvkvypatafgevqygetpirtvyireeqtkalkmgnfkalvkdrringlfsfikeend |
| | tqkhpisqlrlrreleiyqslrvdafketlnleekllkkhtslssvenkfrilleewkke |
| | yaassmvtdehiafiasvrnafchnqypfyeealhapiplftvaqqtteekdglgiaeal |
| | lrvlreyceivksqi (SEQ ID NO: 591) |
| Prevotella | mmekenvqgshiyyeptdkcfwaafynlarhnayltiahinsfvnskkginnddkvldii |
| saccharolytica | ddwskfdndllmgarinklilkhfpflkaplyglakrktrkqqgkeqqdyekkgdedpev |
| F0055 | igeaianafkmanvrktlhaflkqledlrnhfshynynspakkmevkfddgfcnklyyvf |
| AMEP01000091.1) | daalqmvkddnrmnpeinmqtdfehlvrlgrnrkipntfkynftnsdgtinnngllffvs |
| >EKY00089.1 | lflekrdaiwmqkkikgfkggtenymrmtnevfcrnrmvipklrletdydnhqlmfdmln |
| | elvrcplslykrlkqedqdkfrvpiefldedneadnpygenansdenpteetdplkntiv |
| | rhqhrfpyfvlryfdlnevfkqlrfqinlgcyhfsiydktigertekrhltrtlfgfdrl |
| | qnfsvklqpehwknmvkhldteessdkpylsdamphyqienekigihflktdtekketvw |
| | psleveevssnrnkykseknitadaflsthellpmmfyyqllsseektraaagdkvqgvl |
| | qsyrkkifdiyddfangtinsmqklderlakdnllrgnmpqqmlailehqepdmegkake |
| | kldrlitetkkrigkledqfkqkvrigkrradlpkvgsiadwlvndmmrfqpakrnadnt |
| | gvpdskansteyrllgealafysaykdrlepyfrqvnliggtnphpflhrvdwkkcnhll |
| | sfyhdyleakeqylshlspadwqkhqhflllkvrkdignekkdwkkslvagwkngfnlpr |
| | glftesiktwfstdadkvqitdtklfenrvgliakliplyydkvyndkpqpfyqypfnin |
| | drykpedtrkrftaassklwnekkmlyknaqpdssdkieypqyldflswkklerelrmlr |
| | nqdmmvwlmckdlfaqctvegvefadlklsqlevdvnvqdnlnvinnvssmilplsvyps |
| | daqgnvlrnskplhtvyvqenntkllkqgnfksllkdrringlfsfiaaegedlqqhplt |
| | knrleyelsiyqtmrisvfeqtlqlekailtrnkticgnnfnnllnswsehrtdkktlqp |
| | didfliavrnafshnqypmstntvmqgiekfniqtpkleekdglgiasqlakktkdaasr |
| | lqniinggtn (SEQ ID NO: 592) |
| Prevotella | medkpfwaaffnlarhnvyltvnhinklldleklydegkhkeiferedifnisddvmnda |
| saccharolytica | nsngkkrkldikkiwddldtdltrkyqlrelilkhfpfiqpaiigaqtkerttidkdkrs |
| JCM 17484 | tstsndslkqtgegdindllslsnvksmffrllqileqlrnyyshvkhsksatmpnfded |
| (NZ_BAKN01000001.1) | llnwmryifidsvnkvkedyssnsvidpntsfshliykdeqgkikperypftskdgsina |
| >WP_051522484.1 | fgllffvslflekqdsiwmqkkipgfkkasenymkmtnevfcrnhillpkirletvydkd |
| | wmlldmlnevvrcplslykrltpaaqnkfkvpekssdnanrqeddnpfsrilvrhqnrfp |
| | yfvlrffdlnevfttlrfqinlgcyhfaickkqigdkkevhhlirtlygfsrlqnftqnt |
| | rpeewntivkttepssgndgktvqgvplpyisytiphyqienekigikifdgdtavdtdi |
| | wpsystekqlnkpdkytltpgfkadvflsvhellpmmfyyqlllcegmlktdagnavekv |
| | lidtrnaifnlydafvqekintitdlenylqdkpilighlpkqmidllkghqrdmlkave |
| | qkkamlikdterrlklldkqlkqetdvaakntgtllkngqiadwlvndmmrfqpvkrdke |
| | gnpincskansteyqmlqrafafyatdscrlsryftqlhlihsdnshlflsrfeydkqpn |
| | liafyaaylkakleflnelqpqnwasdnyflllrapkndrqklaegwkngfnlprglfte |
| | kiktwfnehktivdisdcdifknrvgqvarlipvffdkkfkdhsqpfyrydfnvgnvskp |
| | teanylskgkreelfksyqnkfknnipaektkeyreyknfslwkkferelrliknqdili |
| | wlmcknlfdekikpkkdilepriaysyikldslqtntstagslnalakvvpmtlaihids |
| | pkpkgkagnnekenkeftvyikeegtkllkwgnfktlladrrikglfsyiehddidlkqh |
| | pltkrrvdleldlyqtcridifqqtlgleaqlldkysdlntdnfyqmligwrkkegiprn |
| | ikedtdflkdvrnafshnqypdskkiafrrirkfnpkelileeeeglgiatqmykevekv |
| | vnrikrielfd (SEQ ID NO: 593) |
| Prevotella buccae | mqkqdklfvdrkknaifafpkyitimenkekpepiyyeltdkhfwaaflnlarhnvytti |
| ATCC 33574 | nhinrrleiaelkddgymmgikgswneqakkldkkvrlrdlimkhfpfleaaayemtnsk |
| (AEPD01000005.1) | spnnkegrekeqsealslnnlknvlfifleklqvlrnyyshykyseespkpifetsllkn |
| >EFU31981.1 | mykvfdanvrlvkrdymhhenidmqrdfthlnrkkqvgrtkniidspnfhyhfadkegnm |
| | tiagllffvslfldkkdaiwmqkklkgfkdgrnlreqmtnevfcrsrislpklklenvqt |
| | kdwmqldmlnelvrcpkslyerlrekdresfkvpfdifsddynaeeepfkntivrhqdrf |
| | pyfvlryfdlneifeqlrfqidlgtyhfsiynkrigdedevrhlthhlygfariqdfapq |
| | nqpeewrklvkdldhfetsgepyisktaphyhlenekigikfcsahnnlfpslqtdktcn |
| | grskfnlgtqftaeaflsvhellpmmfyyllltkdysrkesadkvegiirkeisniyaiy |
| | dafanneinsiadltrrlqntnilqghlpkqmisilkgrqkdmgkeaerkigemiddtqr |
| | rldllckqtnqkirigkrnagllksgkiadwlvndmmrfqpvqkdqnnipinnskanste |
| | yrmlqralalfgsenfrlkayfnqmnlvgndnphpflaetqwehqtnilsfyrnyleark |
| | kylkglkpqnwkqyqhflilkvqktnrntivtgwknsfnlprgiftqpirewfekhnnsk |
| | riydgilsfdrvgfvakaiplyfaeeykdnvqpfydypfnignrlkpkkrqfldkkerve |
| | lwqknkelfknypsekkktdlayldflswkkferelrliknqdivtwlmfkelfnmatve |
| | glkigeihlrdidtntaneesnnilnrimpmklpvktyetdnkgnilkerplatfyieet |
| | etkvlkqgnfkalvkdrringlfsfaettdlnleehpisklsvdlelikyqttrisifem |
| | tlglekklidkystlptdsfrnmlerwlqckanrpelknyvnsliavrnafshnqypmyd |
| | atlfaevkkftlfpsvdtkkielniapqlleivgkaikeieksenkn (SEQ ID NO: |
| | 594) |
| Prevotella buccae | mqkqdklfvdrkknaifafpkyitimenkekpepiyyeltdkhfwaaflnlarhnvytti |
| ATCC 33574 | nhinrrleiaelkddgymmgikgswneqakkldkkvrlrdlimkhfpfleaaayemtnsk |
| (NZ_GL586311.1) | spnnkegrekeqsealslnnlknvlfifleklqvlrnyyshykyseespkpifetsllkn |
| >WP_004343973.1 | mykvfdanvrlvkrdymhhenidmqrdfthlnrkkqvgrtkniidspnfhyhfadkegnm |
| | tiagllffvslfldkkdaiwmqkklkgfkdgrnlreqmtnevfcrsrislpklklenvqt |
| | kdwmqldmlnelvrcpkslyerlrekdresfkvpfdifsddynaeeepfkntivrhqdrf |
| | pyfvlryfdlneifeqlrfqidlgtyhfsiynkrigdedevrhlthhlygfariqdfapq |
| | nqpeewrklvkdldhfetsgepyisktaphyhlenekigikfcsahnnlfpslqtdktcn |
| | grskfnlgtqftaeaflsvhellpmmfyyllltkdysrkesadkvegiirkeisniyaiy |
| | dafanneinsiadltrrlqntnilqghlpkqmisilkgrqkdmgkeaerkigemiddtqr |
| | rldllckqtnqkirigkrnagllksgkiadwlvndmmrfqpvqkdqnnipinnskanste |
| | yrmlqralalfgsenfrlkayfnqmnlvgndnphpflaetqwehqtnilsfyrnyleark |
| | kylkglkpqnwkqyqhflilkvqktnrntivtgwknsfnlprgiftqpirewfekhnnsk |
| | riydgilsfdrvgfvakaiplyfaeeykdnvqpfydypfnignrlkpkkrqfldkkerve |
| | lwqknkelfknypsekkktdlayldflswkkferelrliknqdivtwlmfkelfnmatve |
| | glkigeihlrdidtntaneesnnilnrimpmklpvktyetdnkgnilkerplatfyieet |
| | etkvlkqgnfkalvkdrringlfsfaettdlnleehpisklsvdlelikyqttrisifem |
| | tlglekklidkystlptdsfrnmlerwlqckanrpelknyvnsliavrnafshnqypmyd |
| | atlfaevkkftlfpsvdtkkielniapqlleivgkaikeieksenkn (SEQ ID NO: |
| | 595) |
| Prevotella buccae | mqkqdklfvdrkknaifafpkyitimengekpepiyyeltdkhfwaaflnlarhnvytti |
| D17 | nhinrrleiaelkddgymmdikgswneqakkldkkvrlrdlimkhfpfleaaayeitnsk |
| (NZ_GG739967.1) | spnnkegrekeqsealslnnlknvlfifleklqvlrnyyshykyseespkpifetsllkn |
| >WP_004343581.1 | mykvfdanvrlvkrdymhhenidmqrdfthlnrkkqvgrtkniidspnfhyhfadkegnm |
| | tiagllffvslfldkkdaiwmqkklkgfkdgrnlreqmtnevfcrsrislpklklenvqt |
| | kdwmqldmlnelvrcpkslyerlrekdresfkvpfdifsddydaeeepfkntivrhqdrf |
| | pyfvlryfdlneifeqlrfqidlgtyhfsiynkrigdedevrhlthhlygfariqdfaqq |
| | nqpevwrklvkdldyfeasqepyipktaphyhlenekigikfcsthnnlfpslktektcn |
| | grskfnlgtqftaeaflsvhellpmmfyyllltkdysrkesadkvegiirkeisniyaiy |
| | dafangeinsiadltcrlqktnilqghlpkqmisilegrqkdmekeaerkigemiddtqr |
| | rldllckqtnqkirigkrnagllksgkiadwlvndmmrfqpvqkdqnnipinnskanste |
| | yrmlqralalfgsenfrlkayfnqmnlvgndnphpflaetqwehqtnilsfyrnyleark |
| | kylkglkpqnwkqyqhflilkvqktnrntivtgwknsfnlprgiftqpirewfekhnnsk |
| | riydgilsfdrvgfvakaiplyfaeeykdnvqpfydypfnignklkpqkgqfldkkerve |
| | lwqknkelfknypsekkktdlayldflswkkferelrliknqdivtwlmfkelfnmatve |
| | glkigeihlrdidtntaneesnnilnrimpmklpvktyetdnkgnilkerplatfyieet |
| | etkvlkqgnfkvlakdrringllsfaettdidleknpitklsvdhelikyqttrisifem |
| | tlglekklinkyptlptdsfrnmlerwlqckanrpelknyvnsliavrnafshnqypmyd |
| | atlfaevkkftlfpsvdtkkielniapqlleivgkaikeieksenkn (SEQ ID NO: |
| | 596) |
| Prevotella | mqkqdklfvdrkknaifafpkyitimengekpepiyyeltdkhfwaaflnlarhnvytti |
| sp. MSX73 | nhinrrleiaelkddgymmgikgswneqakkldkkvrlrdlimkhfpfleaaayeitnsk |
| (NZ_ALJQ01000043.1) | spnnkegrekeqsealslnnlknvlfifleklqvlrnyyshykyseespkpifetsllkn |
| >W1_007412163.1 | mykvfdanvrlvkrdymhhenidmqrdfthlnrkkqvgrtkniidspnfhyhfadkegnm |
| | tiagllffvslfldkkdaiwmqkklkgfkdgrnlreqmtnevfcrsrislpklklenvqt |
| | kdwmqldmlnelvrcpkslyerlrekdresfkvpfdifsddydaeeepfkntivrhqdrf |
| | pyfvlryfdlneifeqlrfqidlgtyhfsiynkrigdedevrhlthhlygfariqdfapq |
| | nqpeewrklvkdldhfetsgepyisktaphyhlenekigikfcsthnnlfpslkrektcn |
| | grskfnlgtqftaeaflsvhellpmmfyyllltkdysrkesadkvegiirkeisniyaiy |
| | dafanneinsiadltcrlqktnilqghlpkqmisilegrqkdmekeaerkigemiddtqr |
| | rldllckqtnqkirigkrnagllksgkiadwlvsdmmrfqpvqkdtnnapinnskanste |
| | yrmlqhalalfgsessrlkayfrqmnlvgnanphpflaetqwehqtnilsfyrnyleark |
| | kylkglkpqnwkqyqhflilkvqktnrntivtgwknsfnlprgiftqpirewfekhnnsk |
| | riydgilsfdrvgfvakaiplyfaeeykdnvqpfydypfnignklkpqkgqfldkkerve |
| | lwqknkelfknypseknktdlayldflswkkferelrliknqdivtwlmfkelfktttve |
| | glkigeihlrdidtntaneesnnilnrimpmklpvktyetdnkgnilkerplatfyieet |
| | etkvlkqgnfkvlakdrringllsfaettdidleknpitklsvdyelikyqttrisifem |
| | tlglekklidkystlptdsfrnmlerwlqckanrpelknyvnsliavrnafshnqypmyd |
| | atlfaevkkftlfpsvdtkkielniapqlleivgkaikeieksenkn (SEQ ID NO: |
| | 597) |
| Prevotella pallens | mkeeekgktpvvstynkddkhfwaaflnlarhnvyitvnhinkilgegeinrdgyentle |
| ATCC 700821 | kswneikdinkkdrlskliikhfpflevttyqrnsadttkqkeekqaeaqsleslkksff |
| (AFPY01000052.1) | vfiyklrdlrnhyshykhskslerpkfeedlqekmynifdasiqlvkedykhntdiktee |
| >EGQ18444.1 | dfkhldrkgqfkysfadnegnitesgllffvslflekkdaiwvqkklegfkcsnesyqkm |
| | tnevfcrsrmllpklrlqstqtqdwilldmlnelircpkslyerlreedrkkfrvpieia |
| | dedydaeqepfknalvrhqdrfpyfalryfdyneiftnlrfqidlgtyhfsiykkqigdy |
| | keshhlthklygferigeftkqnrpdewrkfvktfnsfetskepyipettphyhlenqki |
| | girfrndndkiwpslktnseknekskykldksfqaeaflsvhellpmmfyylllktentd |
| | ndneietkkkenkndkqekhkieeiienkiteiyalydafangkinsidkleeyckgkdi |
| | eighlpkqmiailksehkdmateakrkqeemladvqkslesldnqineeienverknssl |
| | ksgeiaswlvndmmrfqpvqkdnegnpinnskansteyqmlqrslalynkeekptryfrq |
| | vnliessnphpflnntewekcnnilsfyrsyleakknfleslkpedweknqyflmlkepk |
| | tncetivqgwkngfnlprgiftepirkwfmehrknitvaelkrvglvakviplffseeyk |
| | dsvqpfynylfnvgninkpdeknflnceerrellrkkkdefkkmtdkekeenpsylefqs |
| | wnkferelrlvrnqdivtwllcmelfnkkkikelnvekiylknintnttkkeknteekng |
| | eekiikeknnilnrimpmrlpikvygrenfsknkkkkirrntfftvyieekgtkllkqgn |
| | fkalerdrrlgglfsfvkthskaesksntisksrveyelgeyqkarieiikdmlaleetl |
| | idkynsldtdnfhnmltgwlklkdepdkasfqndvdlliavrnafshnqypmrnriafan |
| | inpfslssantseekglgianqlkdkthktiekiieiekpietke (SEQ ID NO: |
| | 598) |
| Prevotella pallens | mkeeekgktpvvstynkddkhfwaaflnlarhnvyitvnhinkilgegeinrdgyentle |
| ATCC 700821 | kswneikdinkkdrlskliikhfpflevttyqrnsadttkqkeekqaeaqsleslkksff |
| (NZ_GL982513.1) | vfiyklrdlrnhyshykhskslerpkfeedlqekmynifdasiqlvkedykhntdiktee |
| >WP_006044833.1 | dfkhldrkgqfkysfadnegnitesgllffvslflekkdaiwvqkklegfkcsnesyqkm |
| | tnevfcrsrmllpklrlqstqtqdwilldmlnelircpkslyerlreedrkkfrvpieia |
| | dedydaeqepfknalvrhqdrfpyfalryfdyneiftnlrfqidlgtyhfsiykkqigdy |
| | keshhlthklygferigeftkqnrpdewrkfvktfnsfetskepyipettphyhlenqki |
| | girfrndndkiwpslktnseknekskykldksfqaeaflsvhellpmmfyylllktentd |
| | ndneietkkkenkndkqekhkieeiienkiteiyalydafangkinsidkleeyckgkdi |
| | eighlpkqmiailksehkdmateakrkqeemladvqkslesldnqineeienverknssl |
| | ksgeiaswlvndmmrfqpvqkdnegnpinnskansteyqmlqrslalynkeekptryfrq |
| | vnliessnphpflnntewekcnnilsfyrsyleakknfleslkpedweknqyflmlkepk |
| | tncetivqgwkngfnlprgiftepirkwfmehrknitvaelkrvglvakviplffseeyk |
| | dsvqpfynylfnvgninkpdeknflnceerrellrkkkdefkkmtdkekeenpsylefqs |
| | wnkferelrlvrnqdivtwllcmelfnkkkikelnvekiylknintnttkkeknteekng |
| | eekiikeknnilnrimpmrlpikvygrenfsknkkkkirrntfftvyieekgtkllkqgn |
| | fkalerdrrlgglfsfvkthskaesksntisksrveyelgeyqkarieiikdmlaleetl |
| | idkynsldtdnfhnmltgwlklkdepdkasfqndvdlliavrnafshnqypmrnriafan |
| | inpfslssantseekglgianqlkdkthktiekiieiekpietke (SEQ ID NO: |
| | 599) |
| Prevotella | meddkkttdsiryelkdkhfwaaflnlarhnvyitvnhinkileegeinrdgyettlknt |
| intermedia | wneikdinkkdrlskliikhfpfleaatyrinptdttkqkeekqaeaqsleslrksffvf |
| ATCC 25611 = DSM | iyklrdlrnhyshykhskslerpkfeegllekmynifnasirlvkedyqynkdinpdedf |
| 20706 | khldrteeefnyyftkdnegnitesgllffvslflekkdaiwmqqklrgfkdnrenkkkm |
| NZ_JAEZ01000017.1) | tnevfcrsrmllpklrlqstqtqdwilldmlnelircpkslyerlreedrekfrvpieia |
| >WP_036860899.1 | dedydaeqepfkntivrhqdrfpyfalryfdyneiftnlrfqidlgtyhfsiykkqigdy |
| | keshhlthklygferigeftkqnrpdewrkfvktfnsfetskepyipettphyhlenqki |
| | girfrndndkiwpslktnseknekskykldksfqaeaflsvhellpmmfyylllktentd |
| | ndneietkkkenkndkqekhkieeiienkiteiyalydtfangeiksideleeyckgkdi |
| | eighlpkqmiailkdehkvmateaerkqeemlvdvqkslesldnqineeienverknssl |
| | ksgkiaswlvndmmrfqpvqkdnegkpinnskansteyqllqrtlaffgseherlapyfk |
| | qtkliessnphpflkdtewekcnnilsfyrsyleakknfleslkpedweknqyflklkep |
| | ktkpktivqgwkngfnlprgiftepirkwfmkhrenitvaelkrvglvakviplffseey |
| | kdsvqpfynyhfnvgninkpdeknflnceerrellrkkkdefkkmtdkekeenpsylefk |
| | swnkferelrlvrnqdivtwllcmelfnkkkikelnvekiylknintnttkkeknteekn |
| | geeknikeknnilnrimpmrlpikvygrenfsknkkkkirrntfftvyieekgtkllkqg |
| | nfkalerdrrlgglfsfvktpskaesksntisklrveyelgeyqkarieiikdmlalekt |
| | lidkynsldtdnfnkmltdwlelkgepdkasfqndvdlliavrnafshnqypmrnriafa |
| | ninpfslssantseekglgianqlkdkthktiekiieiekpietke (SEQ ID NO: |
| | 600) |
| Prevotella | meddkkttdsiryelkdkhfwaaflnlarhnvyitvnhinkileedeinrdgyentlens |
| intermedia | wneikdinkkdrlskliikhfpfleattyrqnptdttkqkeekqaeaqsleslkksffvf |
| (NZ_LBGT01000010.1) | iyklrdlrnhyshykhskslerpkfeedlqnkmynifdvsiqfvkedykhntdinpkkdf |
| >WP_061868553.1 | khldrkrkgkfhysfadnegnitesgllffvslflekkdaiwvqkklegfkcsnksyqkm |
| | tnevfcrsrmllpklrlestqtqdwilldmlnelircpkslyerlqgvnrkkfyvsfdpa |
| | dedydaeqepfkntivrhqdrfpyfalryfdynevfanlrfqidlgtyhfsiykkliggq |
| | kedrhlthklygferigefdkqnrpdewkaivkdsdtfkkkeekeeekpyisettphyhl |
| | enkkigiafknhniwpstqteltnnkrkkynlgtsikaeaflsvhellpmmfyylllkte |
| | ntkndnkvggkketkkqgkhkieaiieskikdiyalydafangeinsedelkeylkgkdi |
| | kivhlpkqmiailknehkdmaekaeakqekmklatenrlktldkqlkgkiqngkrynsap |
| | ksgeiaswlvndmmrfqpvqkdengeslnnskansteyqllqrtlaffgseherlapyfk |
| | qtkliessnphpflndtewekcsnilsfyrsylkarknfleslkpedweknqyflmlkep |
| | ktnretivqgwkngfnlprgfftepirkwfmehwksikvddlkrvglvakvtplffseky |
| | kdsvqpfynypfnvgdvnkpkeedflhreerielwdkkkdkfkgykakkkfkemtdkeke |
| | ehrsylefqswnkferelrlvrnqdivtwllctelidklkidelnikelkklrlkdintd |
| | takkeknnilnrvmpmelpvtvykvnkggyiiknkplhtiyikeaetkllkqgnfkalvk |
| | drringlfsfvktpseaesesnpisklrveyelgkyqnarldiiedmlalekklidkyns |
| | ldtdnfhnmltgwlelkgeakkarfqndvklltavrnafshnqypmydenlfgnierfsl |
| | sssniieskgldiaaklkeevskaakkigneednkkeket (SEQ ID NO: 601) |
| Prevotella | mkmeddkktkestnmldnkhfwaaflnlarhnvyitvnhinkvlelknkkdqdiiidndq |
| intermedia 17 | dilaikthwekvngdlnkterlrelmtkhfpfletaiytknkedkeevkqekqakaqsfd |
| (CP003502.1) | slkhclflfleklqearnyyshykysestkepmlekellkkmynifddniqlvikdyqhn |
| >AFJ07523.1 | kdinpdedfkhldrteeefnyyfttnkkgnitasgllffvslflekkdaiwmqqklrgfk |
| | dnreskkkmthevfcrsrmllpklrlestqtqdwilldmlnelircpkslyerlqgeyrk |
| | kfnvpfdsadedydaeqepfkntivrhqdrfpyfalryfdyneiftnlrfqidlgtyhfs |
| | iykkliggqkedrhlthklygferigefakqnrtdewkaivkdfdtyetseepyisetap |
| | hyhlenqkigirfrndndeiwpslktngennekrkykldkqyqaeaflsvhellpmmfyy |
| | lllkkeepnndkknasivegfikreirdiyklydafangeinniddlekycedkgipkrh |
| | lpkqmvailydehkdmaeeakrkqkemvkdtkkllatlekqtqgeiedggrnirllksge |
| | iarwlvndmmrfqpvqkdnegnpinnskansteyqmlqrslalynkeekptryfrqvnli |
| | nssnphpflkwtkweecnnilsfyrsyltkkieflnklkpedweknqyflklkepktnre |
| | tivqgwkngfnlprgiftepirewfkrhqndseeyekvetldrvglvtkviplffkkeds |
| | kdkeeylkkdaqkeinncvqpfygfpynvgnihkpdekdflpseerkklwgdkkykfkgy |
| | kakvkskkltdkekeeyrsylefqswnkferelrlvrnqdivtwllctelidklkvegln |
| | veelkklrlkdidtdtakqeknnilnrvmpmqlpvtvyeiddshnivkdrplhtvyieet |
| | ktkllkqgnfkalvkdrringlfsfvdtssetelksnpiskslveyelgeranarietik |
| | dmilleetliekyktlptdnfsdmlngwlegkdeadkarfqndvkllvavrnafshnqyp |
| | mrnriafaninpfslssadtseekkldianqlkdkthkiikriieiekpietke (SEQ |
| | ID NO: 602) |
| Prevotella | meddkktkestnmldnkhfwaaflnlarhnvyitvnhinkvlelknkkdqdiiidndqdi |
| intermedia | laikthwekvngdlnkterlrelmtkhfpfletaiytknkedkeevkqekqakaqsfdsl |
| (NZ_AP014926.1) | khclflfleklqearnyyshykysestkepmlekellkkmynifddniqlvikdyqhnkd |
| >WP_050955369.1 | inpdedfkhldrteeefnyyfttnkkgnitasgllffvslflekkdaiwmqqklrgfkdn |
| | reskkkmthevfcrsrmllpklrlestqtqdwilldmlnelircpkslyerlqgeyrkkf |
| | nvpfdsadedydaeqepfkntivrhqdrfpyfalryfdyneiftnlrfqidlgtyhfsiy |
| | kkliggqkedrhlthklygferigefakqnrtdewkaivkdfdtyetseepyisetaphy |
| | hlenqkigirfrndndeiwpslktngennekrkykldkqyqaeaflsvhellpmmfyyll |
| | lkkeepnndkknasivegfikreirdiyklydafangeinniddlekycedkgipkrhlp |
| | kqmvailydehkdmaeeakrkqkemvkdtkkllatlekqtqgeiedggrnirllksgeia |
| | rwlvndmmrfqpvqkdnegnpinnskansteyqmlqrslalynkeekptryfrqvnlins |
| | snphpflkwtkweecnnilsfyrsyltkkieflnklkpedweknqyflklkepktnretl |
| | vqgwkngfnlprgiftepirewfkrhqndseeyekvetldrvglvtkviplffkkedskd |
| | keeylkkdaqkeinncvqpfygfpynvgnihkpdekdflpseerkklwgdkkykfkgyka |
| | kvkskkltdkekeeyrsylefqswnkferelrlvrnqdivtwllctelidklkveglnve |
| | elkklrlkdidtdtakqeknnilnrvmpmqlpvtvyeiddshnivkdrplhtvyieetkt |
| | kllkqgnfkalvkdrringlfsfvdtssetelksnpiskslveyelgeranarietikdm |
| | llleetliekyktlptdnfsdmlngwlegkdeadkarfqndvkllvavrnafshnqypmr |
| | nriafaninpfslssadtseekkldianqlkdkthkiikriieiekpietke (SEQ ID |
| | NO: 603) |
| Prevotella | meddkkttdsisyelkdkhfwaaflnlarhnvyitvnhinkvlelknkkdqdiiidndqd |
| intermedia | ilaikthwekvngdlnkterlrelmtkhfpfletaiysknkedkeevkqekqakaqsfds |
| (AP014598.1) | lkhclflfleklqetrnyyshykysestkepmlekellkkmynifddniqlvikdyqhnk |
| BAU18623.1 | dinpdedfkhldrteedfnyyftrnkkgnitesgllffvslflekkdaiwmqqklrgfkd |
| | nreskkkmthevfcrsrmllpklrlestqtqdwilldmlnelircpkslyerlqgedrek |
| | fkvpfdpadedydaeqepfkntivrhqdrfpyfalryfdyneiftnlrfqidlgtfhfsi |
| | ykkliggqkedrhlthklygferigefakqnrpdewkaivkdldtyetsneryisettph |
| | yhlenqkigirfrndndeiwpslktngennekskykldkqyqaeaflsvhellpmmfyyl |
| | llkkeepnndkknasivegfikreirdmyklydafangeinniddlekycedkgipkrhl |
| | pkqmvailydehkdmvkeakrkqrkmvkdtekllaalekqtqektedggrnirllksgei |
| | arwlvndmmrfqpvqkdnegnpinnskansteyqmlqrslalynkeekptryfrqvnlin |
| | ssnphpflkwtkweecnnilsfyrsyltkkieflnklkpedweknqyflklkepktnret |
| | lvqgwkngfnlprgiftepirewfkrhqndskeyekvealdrvglvtkviplffkkedsk |
| | dkeedlkkdaqkeinncvqpfysfpynvgnihkpdekdflhreerielwdkkkdkfkgyk |
| | akvkskkltdkekeeyrsylefqswnkferelrlvrnqdivtwllctelidklkveglnv |
| | eelkklrlkdidtdtakqeknnilnrvmpmqlpvtvyeiddshnivkdrplhtvyieetk |
| | tkllkqgnfkalvkdrringlfsfvdtsseaelksnpiskslveyelgepanarietikd |
| | mllleetliekyknlptdnfsdmlngwlegkdeadkarfqndvkllvavrnafshnqypm |
| | rnriafaninpfslssadtseekkldianqlkdkthkiikriieiekpietke (SEQ |
| | ID NO: 604) |
| Prevotella | mkmeddkkttestnmldnkhfwaaflnlarhnvyitvnhinkvlelknkkdqdiiidndq |
| intermedia ZT | dilaikthwekvngdlnkterlrelmtkhfpfletaiytknkedkeevkqekqaeaqsle |
| (ATMK01000017.1) | slkdclflfleklqearnyyshykysestkepmleegllekmynifddniqlvikdyqhn |
| >KJJ86756.1 | kdinpdedfkhldrkgqfkysfadnegnitesgllffvslflekkdaiwmqqkltgfkdn |
| | reskkkmthevfcrrrmllpklrlestqtqdwilldmlnelircpkslyerlqgeyrkkf |
| | nvpfdsadedydaeqepfkntivrhqdrfpyfalryfdyneiftnlrfqidlgtyhfsiy |
| | kkliggqkedrhlthklygferigefakqnrpdewkalvkdldtyetsneryisettphy |
| | hlenqkigirfrngnkeiwpslktngennekskykldkpyqaeaflsvhellpmmfyyll |
| | lkkeepnndkknasivegfikreirdmyklydafangeinnigdlekycedkgipkrhlp |
| | kqmvailydepkdmvkeakrkqkemvkdtkkllatlekqtqeeiedggrnirllksgeia |
| | rwlvndmmrfqpvqkdnegnpinnskansteyqmlqrslalynkeekptryfrqvnlins |
| | snphpflkwtkweecnnilsfyrnyltkkieflnklkpedweknqyflklkepktnretl |
| | vqgwkngfnlprgiftepirewfkrhqndskeyekvealkrvglvtkviplffkeeyfke |
| | daqkeinncvqpfysfpynvgnihkpdekdflpseerkklwgdkkdkfkgykakvkskkl |
| | tdkekeeyrsylefqswnkferelrlvrnqdivtwllctelidkmkveglnveelqklrl |
| | kdidtdtakqeknnilnrimpmqlpvtvyeiddshnivkdrplhtvyieetktkllkqgn |
| | fkalvkdrringlfsfvdtsskaelkdkpisksvveyelgepanarietikdmillektl |
| | ikkyeklptdnfsdmlngwlegkdesdkarfqndvkllvavrnafshnqypmrnriafan |
| | inpfslssadiseekkldianqlkdkthkiikkiieiekpietke (SEQ ID NO: |
| | 605) |
| Prevotella | meddkkttgsisyelkdkhfwaaflnlarhnvyitinhinklleireidndekvldiktl |
| aurantiaca | wqkgnkdlnqkarlrelmtkhfpfletaiytknkedkkevkqekqaeaqsleslkdclfl |
| JCM 15754 | fldklqearnyyshykysefskepefeegllekmynifgnniqlvindyqhnkdinpded |
| NZ_BAKF01000019.1) | fkhldrkgqfkysfadnegnitesgllffvslflekkdaiwmqqklngfkdnlenkkkmt |
| >WP_025000926.1 | hevfcrsrilmpklrlestqtqdwilldmlnelircpkslyerlqgddrekfkvpfdpad |
| | edynaeqepfkntlirhqdrfpyfvlryfdyneifknlrfqidlgtyhfsiykkliggqk |
| | edrhlthklygferigefakqnrpdewkaivkdldtyetsnkryisettphyhlenqkig |
| | irfrngnkeiwpslktndennekskykldkqyqaeaflsvhellpmmfyylllkkekpnn |
| | deinasivegfikreirnifklydafangeinniddlekycadkgipkrhlpkqmvaily |
| | dehkdmvkeakrkqkemvkdtkkllatlekqtqkekeddgrnvkllksgeiarwlvndmm |
| | rfqpvqkdnegkpinnskansteyqmlqrslalynneekptryfrqvnliesnnphpflk |
| | wtkweecnniltfyysyltkkieflnklkpedwkknqyflklkepktnretivqgwkngf |
| | nlprgiftepirewfkrhqnnskeyekvealdrvglvtkviplffkeeyfkdkeenfked |
| | tqkeindcvqpfynfpynvgnihkpkekdflhreerielwdkkkdkfkgykekikskklt |
| | ekdkeefrsylefqswnkferelrlvrnqdivtwllckelidklkidelnieelkklrin |
| | nidtdtakkeknnilnrvmpmelpvtvyeiddshkivkdkplhtiyikeaetkllkqgnf |
| | kalvkdrringlfsfvktnseaeskrnpisklrveyelgeyqearieliqdmlaleekli |
| | nkykdlptnkfsemlnswlegkdeadkarfqndvdfliavrnafshnqypmhnkiefani |
| | kpfslytannseekglgianqlkdktkettdkikkiekpietke (SEQ ID NO: |
| | 606) |
| Prevotella | mendkrleesacytlndkhfwaaflnlarhnvyitvnhinktlelknkknqeiiidndqd |
| pleuritidis | ilaikthwakvngdlnktdrlrelmikhfpfleaaiysnnkedkeevkeekqakaqsfks |
| F0068 | lkdclflfleklqearnyyshykysesskepefeegllekmyntfdasirlvkedyqynk |
| NZ_AWET01000045.1) | didpekdfkhlerkedfnylftdkdnkgkitkngllffvslflekkdaiwmqqkfrgfkd |
| >WP_021584635.1 | nrgnkekmthevfcrsrmllpkirlestqtqdwilldmlnelircpkslyerlqgayrek |
| | fkvpfdsidedydaeqepfrntivrhqdrfpyfalryfdyneifknlrfqidlgtyhfsi |
| | ykkliggkkedrhlthklygferigeftkqnrpdkwqaiikdldtyetsneryisettph |
| | yhlenqkigirfrndnndiwpslktngeknekskynldkpyqaeaflsvhellpmmfyyl |
| | llkmentdndkednevgtkkkgnknnkqekhkieeiienkikdiyalydaftngeinsid |
| | elaegregkdieighlpkqlivilknkskdmaekanrkqkemikdtkkrlatldkqvkge |
| | iedggrnirllksgeiarwlvndmmrfqpvqkdnegkpinnskansteyqmlqrslalyn |
| | keekptryfrqvnlikssnphpfledtkweecynilsfyrnylkakikflnklkpedwkk |
| | nqyflmlkepktnrktivqgwkngfnlprgiftepikewfkrhqndseeykkvealdrvg |
| | lvakviplffkeeyfkedaqkeinncvqpfysfpynvgnihkpeeknflhceerrklwdk |
| | kkdkfkgykakekskkmtdkekeehrsylefqswnkferelrlvrnqdiltwllctklid |
| | klkidelnieelqklrlkdidtdtakkeknnilnrvmpmrlpvtvyeidksfnivkdkpl |
| | htvyieetgtkllkqgnfkalvkdrringlfsfvktsseaeskskpisklrveyelgayq |
| | karidiikdmlalektlidndenlptnkfsdmlkswlkgkgeankarlqndvgllvavrn |
| | afshnqypmynsevfkgmkllslssdipekeglgiakqlkdkiketieriieiekeirn |
| | (SEQ ID NO: 607) |
| Prevotella | mendkrleestcytlndkhfwaaflnlarhnvyitinhinklleirgidndekvldikal |
| pleuritidis | wqkvdkdinqkarlrelmikhfpfleaaiysnnkedkeevkeekqakaqsfkslkdclfl |
| JCM 14110 | fleklqearnyyshykssesskepefeegllekmyntfgvsirlvkedyqynkdidpekd |
| (NZ_BAJN01000005.1) | fkhlerkedfnylftdkdnkgkitkngllffvslflekkdaiwmqqklrgfkdnrgnkek |
| >WP_036931485.1 | mthevfcrsrmllpkirlestqtqdwilldmlnelircpkslyerlqgayrekfkvpfds |
| | idedydaeqepfrntivrhqdrfpyfalryfdyneifknlrfqidlgtyhfsiykkligd |
| | nkedrhlthklygferigefakqkrpnewqalvkdldiyetsnegyisettphyhlenqk |
| | igirfknkkdkiwpsletngkenekskynldksfqaeaflsihellpmmfydlllkkeep |
| | nndeknasivegfikkeikrmyaiydafaneeinskegleeycknkgfgerhlpkqmiai |
| | ltnksknmaekakrkqkemikdtkkrlatldkqvkgeiedggrnirllksgeiarwlvnd |
| | mmrfqsvqkdkegkpinnskansteyqmlqrslalynkeqkptpyfiqvnlikssnphpf |
| | leetkweecnnilsfyrsyleakknfleslkpedwkknqyflmlkepktnrktivqgwkn |
| | gfnlprgiftepikewfkrhqndseeykkvealdrvglvakviplffkeeyfkedaqkei |
| | nncvqpfysfpynvgnihkpeeknflhceerrklwdkkkdkfkgykakekskkmtdkeke |
| | ehrsylefqswnkferelrlvrnqdivtwllctelidklkidelnieelqklrlkdidtd |
| | takkeknnilnrimpmqlpvtvyeidksfnivkdkplhtiyieetgtkllkqgnfkalvk |
| | drringlfsfvktsseaeskskpisklrveyelgayqkaridiikdmlalektlidnden |
| | lptnkfsdmlkswlkgkgeankarlqndvdllvairnafshnqypmynsevfkgmkllsl |
| | ssdipekeglgiakqlkdkiketieriieiekeirn (SEQ ID NO: 608) |
| Prevotella falsenii | mkndnnstkstdytlgdkhfwaaflnlarhnvyitvnhinkvlelknkkdqeiiidndqd |
| DSM 22864 = | ilaiktlwgkvdtdinkkdrlrelimkhfpfleaatyqqsstnntkqkeeeqakaqsfes |
| J0415124 | lkdclflfleklrearnyyshykhsksleepkleekllenmynifdtnvqlvikdyehnk |
| NZ_BAJY01000004.1) | dinpeedfkhlgraegefnyyftrnkkgnitesgllffvslflekkdaiwaqtkikgfkd |
| >WP_036884929.1 | nrenkqkmthevfcrsrmllpklrlestqtqdwilldmlnelircpkslykrlqgekrek |
| | frvpfdpadedydaeqepfkntivrhqdrfpyfalryfdyneiftnlrfqidlgtyhfsi |
| | ykkqigdkkedrhlthklygferigefakenrpdewkalvkdldtfeesnepyisettph |
| | yhlenqkigirnknkkkkktiwpsletkttvnerskynlgksfkaeaflsvhellpmmfy |
| | ylllnkeepnngkinaskvegiiekkirdiyklygafaneeinneeelkeycegkdiair |
| | hlpkqmiailkneykdmakkaedkqkkmikdtkkrlaaldkqvkgevedggrnikplksg |
| | riaswlvndmmrfqpvqrdrdgypinnskansteyqllqrtlalfgsererlapyfrqmn |
| | ligkdnphpflkdtkwkehnnilsfyrsyleakknflgslkpedwkknqyflklkepktn |
| | retivqgwkngfnlprgiftepirewfirhqneseeykkvkdfdriglvakviplffked |
| | yqkeiedyvqpfygypfnvgnihnsgegtflnkkereelwkgnktkfkdyktkeknkekt |
| | nkdkfkkktdeekeefrsyldfqswkkferelrlvrnqdivtwllcmelidklkidelni |
| | eelqklrlkdidtdtakkeknnilnrimpmelpvtvyetddsnniikdkplhtiyikeae |
| | tkllkqgnfkalvkdrringlfsfvetsseaelkskpiskslveyelgeyqrarveiikd |
| | mlrleetligndeklptnkfrqmldkwlehkketddtdlkndvklltevrnafshnqypm |
| | rdriafanikpfslssantsneeglgiakklkdktketidriieieeqtatkr (SEQ |
| | ID NO: 609) |
| Porphyromonas gulae | mteqserpyngtyytledkhfwaaflnlarhnayitlthidrqlayskaditndqdvlsf |
| NZ_JRAT01000012.1) | kalwknldndlerksrlrslilkhfsflegaaygkklfeskssgnkssknkeltkkekee |
| >WP_039418912.1 | lqanalsldnlksilfdflqklkdfrnyyshyrhsgsselplfdgnmlqrlynvfdvsvq |
| | rvkrdhehndkvdphrhfnhlvrkgkkdryghndnpsfkhhfvdsegmvteagllffvsl |
| | flekrdaiwmqkkirgfkggtetyqqmtnevfcrsrislpklkleslrmddwmlldmlne |
| | lvrcpkplydrlreddracfrvpvdilpdeddtdgggedpfkntivrhqdrfpyfalryf |
| | dlkkvftslrfhidlgtyhfaiykkmigeqpedrhltrnlygfgriqdfaeehrpeewkr |
| | lvrdldyfetgdkpyisqtsphyhiekgkiglrfmpegqhlwpspevgttrtgrskyaqd |
| | krltaeaflsvhelmpmmfyyfllrekyseevsaekvqgrikrviedvyaiydafardei |
| | ntlkeldacladkgirrghlpkqmiailsgehknmeekvrkklqemiadtdhrldmldrq |
| | tdrkirigrknaglpksgviadwlvrdmmrfqpvakdasgkpinnskansteyrmlqral |
| | alfggekerltpyfrqmnitggnnphpflhdtrweshtnilsfyrsylrarkaflerigr |
| | sdrmenrpflllkepktdrqtivagwksefhlprgifteavrdcliemgydevgsyrevg |
| | fmakavplyferacedrvqpfydspfnvgnslkpkkgrflskeeraeewergkerfrdle |
| | awshsaarriedafagieyaspgnkkkieqllrdlslweafesklkvradkinlaklkke |
| | ileagehpyhdfkswqkferelrlvknqdiitwmmcrdlmeenkvegldtgtlylkdirt |
| | nvqeqgslnvinhvkpmrlpvvvyradsrghvhkeeaplatvyieerdtkllkqgnfksf |
| | vkdrringlfsfvdtgglamegypisklrveyelakyqtarvcafeqtleleeslltryp |
| | hlpdknfrkmleswsdpllakwpelhgkvrlliavrnafshnqypmydeavfssirkydp |
| | sspdaieermglniahrlseevkqaketveriiqa (SEQ ID NO: 610) |
| Porphyromonas | mteqserpyngtyytledkhfwaaflnlarhnayitlthidrqlayskaditndqdvlsf |
| sp. COT-052 OH4946 | kalwknfdndlerksrlrslilkhfsflegaaygkklfeskssgnkssknkeltkkekee |
| (NZ_JQZY01000014.1) | lqanalsldnlksilfdflqklkdfrnyyshyrhsesselplfdgnmlqrlynvfdvsvq |
| >WP_039428968.1 | rvkrdhehndkvdphrhfnhlvrkgkkdryghndnpsfkhhfvdsegmvteagllffvsl |
| | flekrdaiwmqkkirgfkggtetyqqmtnevfcrsrislpklkleslrtddwmlldmlne |
| | lvrcpkplydrlreddracfrvpvdilpdeddtdgggedpfkntivrhqdrfpyfalryf |
| | dlkkvftslrfhidlgtyhfaiykkmigeqpedrhltrnlygfgriqdfaeehrpeewkr |
| | lvrdldyfetgdkpyisqttphyhiekgkiglrfvpegqhlwpspevgttrtgrskyaqd |
| | krltaeaflsvhelmpmmfyyfllrekyseevsaekvqgrikrviedvyaiydafardei |
| | ntlkeldacladkgirrghlpkqmigilsgerkdmeekvrkklqemiadtdhrldmldrq |
| | tdrkirigrknaglpksgviadwlvrdmmrfqpvakdtsgkpinnskansteyrmlqral |
| | alfggekerltpyfrqmnitggnnphpflhetrweshtnilsfyrsylrarkaflerigr |
| | sdrvencpflllkepktdrqtivagwkgefhlprgifteavrdcliemgydevgsyrevg |
| | fmakavplyferacedrvqpfydspfnvgnslkpkkgrflskedraeewergkerfrdle |
| | awshsaarrikdafagieyaspgnkkkieqllrdlslweafesklkvradkinlaklkke |
| | ileagehpyhdfkswqkferelrlvknqdiitwmmcrdlmeenkvegldtgtlylkdirp |
| | nvqeqgslnvinrvkpmrlpvvvyradsrghvhkeeaplatvyieerdtkllkqgnfksf |
| | vkdrringlfsfvdtgglamegypisklrveyelakyqtarvcvfeltlrleesllsryp |
| | hlpdesfremleswsdpllakwpelhgkvrlliavrnafshnqypmydeavfssirkydp |
| | sspdaieermglniahrlseevkqaketveriiqa (SEQ ID NO: 611) |
| Porphyromonas gulae | mteqserpyngtyytledkhfwaaflnlarhnayitlthidrqlayskaditndqdvlsf |
| (NZ_JRFD01000046.1) | kalwknldndlerksrlrslilkhfsflegaaygkklfeskssgnkssknkeltkkekee |
| >WP_039442171A | lqanalsldnlksilfdflqklkdfrnyyshyrhsgsselplfdgnmlqrlynvfdvsvq |
| | rvkrdhehndkvdphyhfnhlvrkgkkdryghndnpsfkhhfvdsegmvteagllffvsl |
| | flekrdaiwmqkkirgfkggtgpyeqmtnevfcrsrislpklkleslrtddwmlldmlne |
| | lvrcpkplydrlrekdracfrvpvdilpdeddtdgggedpfkntivrhqdrfpyfalryf |
| | dlkkvftslrfhidlgtyhfaiykkmigeqpedrhltrnlygfgriqdfaeehrpeewkr |
| | lvrdldyletgdkpyisqttphyhiekgkiglrfvpegqhlwpspevgttrtgrskcaqd |
| | krltaeaflsvhelmpmmfyyfllrekyseevsaekvqgrikrviedvyaiydafardei |
| | ntlkeldtcladkgirrghlpkqmitilsgerkdmkekirkklqemiadtdhrldmldrq |
| | tdrkirigrknaglpksgviadwlvrdmmrfqpvakdasgkpinnskansteyrmlqral |
| | alfggekerltpyfrqmnitggnnphpflhetrweshtnilsfyrsylrarkaflerigr |
| | sdrvencpflllkepktdrqtivagwkdefhlprgifteavrdcliemgydevgsyrevg |
| | fmakavplyferacedrvqpfydspfnvgnslkpkkgrflskedraeewergmerfrdle |
| | awshsaarrikdafagieyaspgnkkkieqllrdlslweafesklkvradkinlaklkke |
| | ileagehpyhdfkswqkferelrlvknqdiitwmmcrdlmeenkvegldtgtlylkdirp |
| | nvqeqgslnvinrvkpmrlpvvvyradsrghvhkeaplatvyieerntkllkqgnfksfv |
| | kdrringlfsfvdtgglamegypisklrveyelakyqtarvcvfeltlrleesllsryph |
| | lpdesfremleswsdpllakwpelhgkvrlliavrnafshnqypmydeavfssirkydps |
| | spdaieermglniahrlseevkqaketveriiqa (SEQ ID NO: 612) |
| Porphyromonas gulae | mteqserpyngtyytledkhfwaaflnlarhnayitlthidrqlayskaditndqdvlsf |
| (NZ_JRAJ01000010.1) | kalwknfdndlerksrlrslilkhfsflegaaygkklfeskssgnkssknkeltkkekee |
| >WP_039431778A | lqanalsldnlksilfdflqklkdfrnyyshyrhsesselplfdgnmlqrlynvfdvsvq |
| | rvkrdhehndkvdphrhfnhlvrkgkkdryghndnpsfkhhfvdgegmvteagllffvsl |
| | flekrdaiwmqkkirgfkggtetyqqmtnevfcrsrislpklkleslrtddwmlldmlne |
| | lvrcpkplydrlreddracfrvpvdilpdeddtdgggedpfkntivrhqdrfpyfalryf |
| | dlkkvftslrfhidlgtyhfaiykkmigeqpedrhltrnlygfgriqdfaeehrpeewkr |
| | lvrdldyfetgdkpyisqtsphyhiekgkiglrfmpegqhlwpspevgttrtgrskyaqd |
| | krltaeaflsvhelmpmmfyyfllrekyseevsaekvqgrikrviedvyaiydafardei |
| | ntlkeldacladkgirrghlpkqmiailsgehkdmeekirkklqemiadtdhrldmldrq |
| | tdrkirigrknaglpksgviadwlvrdmmrfqpvakdtsgkpinnskansteyrmlqral |
| | alfggekkrltpyfrqmnitggnnphpflhetrweshtnilsfyrsylrarkaflerigr |
| | sdrmenrpflllkepktdrqtivagwksefhlprgifteavrdcliemgydevgsyrevg |
| | fmakavplyferacedrvqpfydspfnvgnslkpkkgrflskeeraeewergkerfrdle |
| | awshsaarriedafagieyaspgnkkkieqllrdlslweafesklkvradkinlaklkke |
| | ileagehpyhdfkswqkferelrlvknqdiitwmmcrdlmeenkvegldtgtlylkdirp |
| | nvqeqgslnvinrvkpmrlpvvvyradsrghvhkeeaplatvyieerdtkllkqgnfksf |
| | vkdrringlfsfvdtgglamegypisklrveyelakyqtarvcvfeltlrleeslltryp |
| | hlpdesfrkmleswsdpllakwpelhgkvrlliavrnafshnqypmydeavfssirkydp |
| | sspdaieermglniahrlseevkqaketveriiqv (SEQ ID NO: 613) |
| Porphyromonas gulae | mteqserpyngtyytledkhfwaaflnlarhnayitlthidrqlayskaditndqdvlsf |
| (NZ_KQ040500.1) | kalwknfdndlerksrlrslilkhfsflegaaygkklfeskssgnkssknkeltkkekee |
| >WP_046201018A | lqanalsldnlksilfdflqklkdfrnyyshyrhsesselplfdgnmlqrlynvfdvsvq |
| | rvkrdhehndkvdphrhfnhlvrkgkkdryghndnpsfkhhfvdsegmvteagllffvsl |
| | flekrdaiwmqkkirgfkggtetyqqmtnevfcrsrislpklkleslrtddwmlldmlne |
| | lvrcpkplydrlrekdrarfrvpvdilpdeddtdgggedpfkntivrhqdrfpyfalryf |
| | dlkkvftslrfhidlgtyhfaiykkmigeqpedrhltrnlygfgriqdfaeehrpeewkr |
| | lvrdldyfetgdkpyisqttphyhiekgkiglrfmpegqhlwpspevgttrtgrskyaqd |
| | krltaeaflsvhelmpmmfyyfllrekyseevsaekvqgrikrviedvyaiydafardei |
| | ntlkeldacladkgirrghlpkqmiailsgehkdmeekirkklqemiadtdhrldmldrq |
| | tdrkirigrknaglpksgviadwlvrdmmrfqpvakdtsgkpinnskansteyrmlqral |
| | alfggekkrltpyfrqmnitggnnphpflhetrweshtnilsfyrsylrarkaflerigr |
| | sdrmenrpflllkepktdrqtivagwksefhlprgifteavrdcliemgydevgsyrevg |
| | fmakavplyferacedrvqpfydspfnvgnslkpkkgrflskeeraeewergkerfrdle |
| | awshsaarriedafagieyaspgnkkkieqllrdlslweafesklkvradkinlaklkke |
| | ileagehpyhdfkswqkferelrlvknqdiitwmmcrdlmeenkvegldtgtlylkdirp |
| | nvqeqgslnvinrvkpmrlpvvvyradsrghvhkeeaplatvyieerdtkllkqgnfksf |
| | vkdrringlfsfvdtgglamegypisklrveyelakyqtarvcvfeltlrleeslltryp |
| | hlpdesfrkmleswsdpllakwpelhgkvrlliavrnafshnqypmydeavfssirkydp |
| | sspdaieermglniahrlseevkqaketveriiqv (SEQ ID NO: 614) |
| Porphyromonas gulae | mteqserpyngtyytledkhfwaaflnlarhnayitlthidrqlayskaditndqdvlsf |
| (NZ_JRAL01000022.1) | kalwknfdndlerksrlrslilkhfsflegaaygkklfeskssgnkssknkeltkkekee |
| >WP_039434803.1 | lqanalsldnlksilfdflqklkdfrnyyshyrhsgsselplfdgnmlqrlynvfdvsvq |
| | rvkidhehndevdphyhfnhlvrkgkkdryghndnpsfkhhfvdgegmvteagllffvsl |
| | flekrdaiwmqkkirgfkggtetyqqmtnevfcrsrislpklkleslrmddwmlldmlne |
| | lvrcpkplydrlreddracfrvpvdilpdeddtdgggedpfkntivrhqdrfpyfalryf |
| | dlkkvftslrfhidlgtyhfaiykkmigeqpedrhltrnlygfgriqdfaeehrpeewkr |
| | lvrdldyfetgdkpyisqtsphyhiekgkiglrfmpegqhlwpspevgttrtgrskyaqd |
| | krltaeaflsvhelmpmmfyyfllrekyseevsaervqgrikrviedvyavydafardei |
| | ntrdeldacladkgirrghlprqmiailsgehkdmeekirkklqemmadtdhrldmldrq |
| | tdrkirigrknaglpksgviadwlvrdmmrfqpvakdasgkpinnskansteyrmlqral |
| | alfggekerltpyfrqmnitggnnphpflhetrweshtnilsfyrsylrarkaflerigr |
| | sdrvenrpflllkepktdrqtivagwkgefhlprgifteavrdcliemghdevasykevg |
| | fmakavplyferacedrvqpfydspfnvgnslkpkkgrflskeeraeewergkerfrdle |
| | awsysaarriedafagieyaspgnkkkieqllrdlslweafesklkvradrinlaklkke |
| | ileagehpyhdfkswqkferelrlvknqdiitwmmcrdlmeenkvegldtgtlylkdirp |
| | nvqeqgslnvinrvkpmrlpvvvyradsrghvhkeeaplatvyieerdtkllkqgnfksf |
| | vkdrringlfsfvdtgglamegypisklrveyelakyqtarvcvfeltlrleeslltryp |
| | hlpdesfremleswsdpllakwpelhgkvrlliavrnafshnqypmydeavfssirkydp |
| | sspdaieermglniahrlseevkqaketveriiqa (SEQ ID NO: 615) |
| Porphyromonas gulae | mteqserpyngtyytledkhfwaaflnlarhnayitlthidrqlayskaditndqdvlsf |
| (NZ_JRAI01000002.1) | kalwknldndlerksrlrslilkhfsflegaaygkklfeskssgnkssknkeltkkekee |
| >WP_039419792.1 | lqanalsldnlksilfdflqklkdfrnyyshyrhsgsselplfdgnmlqrlynvfdvsvq |
| | rvkrdhehndkvdphrhfnhlvrkgkkdryghndnpsfkhhfvdgegmvteagllffvsl |
| | flekrdaiwmqkkirgfkggtetyqqmtnevfcrsrislpklkleslrtddwmlldmlne |
| | lvrcpkplydrlrekdrarfrvpvdilpdeddtdgggedpfkntivrhqdrfpyfalryf |
| | dlkkvftslrfhidlgtyhfaiykkvigeqpedrhltrnlygfgriqdfaeehrpeewkr |
| | lvrdldyfetgdkpyisqttphyhiekgkiglrfvpegqhlwpspevgttrtgrskyaqd |
| | krltaeaflsvhelmpmmfyyfllrekyseevsaekvqgrikrviedvyaiydafardei |
| | ntrdeldacladkgirrghlpkqmigilsgehknmeekvrkklqemiadtdhrldmldrq |
| | tdrkirigrknaglpksgviadwlvrdmmrfqpvakdtsgkpinnskansteyrmlqral |
| | alfggekerltpyfrqmnitggnnphpfldetrweshtnilsfyrsylrarkaflerigr |
| | sdrvenrpflllkepktdrqtivagwksefhlprgifteavrdcliemgydevgsykevg |
| | fmakavplyferackdrvqpfydspfnvgnslkpkkgrflskekraeewesgkerfrlak |
| | lkkeileagehpyhdfkswqkferelrlvknqdiitwmmcrdlmeenkvegldtgtlylk |
| | dirpnvqeqgslnvinrvkpmrlpvvvyradsrghvhkeeaplatvyieerdtkllkqgn |
| | fksfvkdrringlfsfvdtgglamegypisklrveyelakyqtarvcvfeltlrleesll |
| | sryphlpdesfremleswsdpllakwpelhgkvrlliavrnafshnqypmydeavfssir |
| | kydpsspdaieermglniahrlseevkqaketveriiqa (SEQ ID NO: 616) |
| Porphyromonas gulae | mteqserpyngtyytledkhfwaaflnlarhnayitlthidrqlayskaditndqdvlsf |
| (NZ_JRAK01000129.1) | kalwknfdndlerksrlrslilkhfsflegaaygkklfeskssgnkssknkeltkkekee |
| >WP_039426176.1 | lqanalsldnlksilfdflqklkdfrnyyshyrhsgsselplfdgnmlqrlynvfdvsvq |
| | rvkrdhehndkvdphyhfnhlvrkgkkdryghndnpsfkhhfvdsegmvteagllffvsl |
| | flekrdaiwmqkkirgfkggtgpyeqmtnevfcrsrislpklkleslrtddwmlldmlne |
| | lvrcpkplydrlrekdracfrvpvdilpdeddtdgggedpfkntivrhqdrfpyfalryf |
| | dlkkvftslrfhidlgtyhfaiykkmigeqpedrhltrnlygfgriqdfaeehrpeewkr |
| | lvrdldyfetgdkpyisqttphyhiekgkiglrfmpegqhlwpspevgttrtgrskyaqd |
| | krltaeaflsvhelmpmmfyyfllrekyseevsaekvqgrikrvikdvyaiydafardei |
| | ntlkeldacsadkgirrghlpkqmigilsgehknmeekvrkklqemiadtdhrldmldrq |
| | tdrkirigrknaglpksgviadwlvrdmmrfqpvakdtsgkpinnskansteyrmlqral |
| | alfggekerltpyfrqmnitggnnphpfldetrweshtnilsfyrsylrarkaflerigr |
| | sdrvenrpflllkepkndrqtivagwksefhlprgifteavrdcliemgydevgsykevg |
| | fmakavplyferackdrvqpfydspfnvgnslkpkkgrflskekraeewesgkerfrlak |
| | lkkeileakehpyhdfkswqkferelrlvknqdiitwmmcrdlmeenkvegldtgtlylk |
| | dirtdvheqgslnvinrvkpmrlpvvvyradsrghvhkeqaplatvyieerdtkllkqgn |
| | fksfvkdrringlfsfvdtgglamegypisklrveyelakyqtarvcafeqtleleesll |
| | tryphlpdenfremleswsdpllgkwpdlhgkvrlliavrnafshnqypmydeavfssir |
| | kydpsspdaieermglniahrlseevkqaketveriiqa (SEQ ID NO: 617) |
| Porphyromonas gulae | mteqserpyngtyytledkhfwaaflnlarhnayitlthidrqlayskaditndedilff |
| (NZ_KN294104.1) | kgqwknldndlerksrlrslilkhfsflegaaygkkffeskssgnkssknkeltkkekee |
| >WP_039437199.1 | lqanalsldnlksilfdflqklkdfrnyyshyrhsgsselplfdgnmlqrlynvfdvsvq |
| | rvkrdhehndevdphyhfnhlvrkgkkdryghndnpsfkhhfvdgegmvteagllffvsl |
| | flekrdaiwmqkkirgfkggtepyeqmtnevfcrsrislpklkleslrtddwmlldmlne |
| | lvrcpkplydrlrekdracfrvpvdilpdeddtdgggedpfkntivrhqdrfpyfalryf |
| | dlkkvftslrfhidlgtyhfaiykkmigeqpedrhltrnlygfgriqdfaeehrpeewkr |
| | lvrdldyfetgdkpyisqttphyhiekgkiglrfvpegqhlwpspevgttrtgrskyaqd |
| | krltaeaflsvhelmpmmfyyfllrekyseevsaekvqgrikrviedvyaiydafardei |
| | ntlkeldacladkgirrghlpkqmigilsgerkdmeekvrkklqemiadtdhrldmldrq |
| | tdrkirigrknaglpksgviadwlvrdmmrfqpvakdtsgkpinnskansteyrmlqral |
| | alfggekerltpyfrqmnitggnnphpflhetrweshtnilsfyrsylrarkaflerigr |
| | sdrvencpflllkepktdrqtivagwkgefhlprgifteavrdcliemgydevgsyrevg |
| | fmakavplyferacedrvqpfydspfnvgnslkpkkgrflskekraeewesgkerfrlak |
| | lkkeileagehpyhdfkswqkferelrlvknqdiitwmmcrdlmeenkvegldtgtlylk |
| | dirpnvqeqgslnvinrvkpmrlpvvvyradsrghvhkeeaplatvyieerdtkllkqgn |
| | fksfvkdrringlfsfvdtgalamegypisklrveyelakyqtarvcafeqtleleesll |
| | tryphlpdesfremleswsdplltkwpelhgkvrlliavrnafshnqypmydeavfssiw |
| | kydpsspdaieermglniahrlseevkqaketieriiqa (SEQ ID NO: 618) |
| Porphyromonas | mtegnekpyngtyytledkhfwaaffnlarhnayitlahidrqlayskaditndedilff |
| gingivalis TDC60 | kgqwknldndlerkarlrslilkhfsflegaaygkklfesqssgnkssknkeltkkekee |
| (NC_015571.1) | lqanalsldnlksilfdflqklkdfrnyyshyrhpesselplfdgnmlqrlynvfdvsvq |
| >WP_013816155.1 | rvkrdhehndkvdphrhfnhlvrkgkkdrygnndnpffkhhfvdregtvteagllffvsl |
| | flekrdaiwmqkkirgfkggtetyqqmtnevfcrsrislpklkleslrtddwmlldmlne |
| | lvrcpkslydrlreedrarfrvpvdilsdeedtdgaeedpfkntivrhqdrfpyfalryf |
| | dlkkvftslrfqidlgtyhfaiykknigeqpedrhltrnlygfgriqdfaeehrpeewkr |
| | lvrdldyfetgdkpyitqttphyhiekgkiglrfvpegqhlwpspevgatrtgrskyaqd |
| | krftaeaflsahelmpmmfyyfllrekyseeasaervqgrikrviedvyavydafardei |
| | ntrdeldacladkgirrghlprqmigilsgehkdmeekirkklqemmadtdhrldmldrq |
| | tdrkirigrknaglpksgviadwlvrdmmrfqpvakdtsgkpinnskansteyrmlqral |
| | alfggekerltpyfrqmnitggnnphpflhetrweshtnilsfyrsylkarkaflqsigr |
| | sdrvenhrflllkepktdrqtivagwkgefhlprgifteavrdcliemgldevgsykevg |
| | fmakavplyferackdwvqpfynypfnvgnslkpkkgrflskekraeewesgkerfrlak |
| | lkkeileakehpyldfkswqkferelrlvknqdiitwmicgdlmeenkvegldtgtlylk |
| | dirtdvqeqgslnvinrvkpmrlpvvvyradsrghvhkeqaplatvyieerdtkllkqgn |
| | fksfvkdrringlfsfvdtgalamegypisklrveyelakyqtarvcafeqtleleesll |
| | trcphlpdknfrkmleswsdplldkwpdlhrkvrlliavrnafshnqypmydeavfssir |
| | kydpsfpdaieermglniahrlseevkqaketveriiqa (SEQ ID NO: 619) |
| Porphyromonas | mtegnerpyngtyytledkhfwaaffnlarhnayitlahidrqlayskaditndedilff |
| gingivalis | kgqwknldndlerkarlrslilkhfsflegaaygkklfesqssgnksskkkeltkkekee |
| ATCC 33277 | lqanalsldnlksilfdflqklkdfrnyyshyrhpesselplfdgnmlqrlynvfdvsvq |
| (NC_010729.1) | rvkrdhehndkvdphrhfnhlvrkgkkdrygnndnpffkhhfvdreekvteagllffvsl |
| >WP_012458414.1 | flekrdaiwmqkkirgfkggtetyqqmtnevfcrsrislpklkleslrtddwmlldmlne |
| | lvrcpkslydrlreedrarfrvpvdilsdeddtdgteedpfkntivrhqdrfpyfalryf |
| | dlkkvftslrfhidlgtyhfaiykknigeqpedrhltrnlygfgriqdfaeehrpeewkr |
| | lvrdldyfetgdkpyitqttphyhiekgkiglrfvpegqhlwpspevgatrtgrskyaqd |
| | krltaeaflsvhelmpmmfyyfllrekysdeasaervqgrikrviedvyavydafargei |
| | ntrdeldacladkgirrghlprqmigilsgehkdmeekvrkklqemivdtdhrldmldrq |
| | tdrkirigrknaglpksgviadwlvrdmmrfqpvakdtsgkpinnskansteyrmlqral |
| | alfggekerltpyfrqmnitggnnphpflhetrweshtnilsfyrsylkarkaflqsigr |
| | sdrvenhrflllkepktdrqtivagwkgefhlprgifteavrdcliemgldevgsykevg |
| | fmakavplyferackdrvqpfydypfnvgnslkpkkgrflskekraeewesgkerfrlak |
| | lkkeileakehpyldfkswqkferelrlvknqdiitwmicrdlmeenkvegldtgtlylk |
| | dirtdvqeqgninvinrvkpmrlpvvvyradsrghvhkeqaplatvyieerdtkllkqgn |
| | fksfvkdrringlfsfvdtgalamegypisklrveyelakyqtarvcafeqtleleesll |
| | tryphlpdknfrkmleswsdplldkwpdlhgnvrlliavrnafshnqypmydeavfssir |
| | kydpsspdaieermglniahrlseevkqakemaeriiqa (SEQ ID NO: 620) |
| Porphyromonas | mtegnekpyngtyytlkdkhfwaaffnlarhnayitlthidrqlayskaditndedilff |
| gingivalis | kgqwknldndlerkarlrslilkhfsflegaaygkklfesqssgnksskkkeltkkekee |
| A7A1-28 | lqanalsldnlksilfdflqklkdfrnyyshyrhpesselpmfdgnmlqrlynvfdvsvq |
| (NZCP013131.1) | rvkrdhehndkvdphrhfnhlvrkgkkdrcgnndnpffkhhfvdregkvteagllffvsl |
| >WP_058019250.1 | flekrdaiwmqkkirgfkggtetyqqmtnevfcrsrislpklkleslrtddwmlldmlne |
| | lvrcpkslydrlreedracfrvpvdilsdeddtdgaeedpfkntivrhqdrfpyfalryf |
| | dlkkvftslrfhidlgtyhfaiykknigeqpedrhltrnlygfgriqdfaeehrpeewkr |
| | lvrdldcfetgdkpyitqttphyhiekgkiglrfvpegghlwpspevgatrtgrskyaqd |
| | krftaeaflsvhelmpmmfyyfllrekyseevsaervqgrikrviedvyavydafardei |
| | ntrdeldacladkgirrghlprqmiailsqkhkdmeekvrkklqemiadtdhrldmldrq |
| | tdrkirigrknaglpksgviadwlvrdmmrfqpvakdtsgkpinnskansteyrmlqral |
| | alfggekerltpyfrqmnitggnnphpflhetrweshtnilsfyrsylkarkaflqsigr |
| | sdrvenhrflllkepktdrqtivagwkgefhlprgifteavrdcliemgldevgsykevg |
| | fmakavplyferackdrvqpfydypfnvgnslkpkkgrflskekraeewesgkerfrdle |
| | awshsaarriedafagienasrenkkkieqllqdlslwetfesklkvkadkiniaklkke |
| | ileakehpyldfkswqkferelrlvknqdiitwmmcrdlmeenkvegldtgtlylkdirt |
| | dvqeqgslnvinhvkpmrlpvvvyradsrghvhkeqaplatvyieerdtkllkqgnfksf |
| | vkdrringlfsfvdtgalamegypisklrveyelakyqtarvcafeqtleleeslltryp |
| | hlpdenfrkmleswsdplldkwpdlhrkvrlliavrnafshnqypmydeavfssirkydp |
| | sspdaieermglniahrlseevkqakemaeriiqa (SEQ ID NO: 621) |
| Porphyromonas | mtegnekpyngtyytledkhfwaaffnlarhnayitlthidrqlayskaditndedilff |
| gingivalis | kgqwknldndlerkarlrslilkhfsflegaaygkklfesqssgnksskkkeltkkekee |
| JCVI SC001 | lqanalsldnlksilfdflqklkdfrnyyshyrhpesselplfdgnmlqrlynvfdvsvq |
| APMB01000175.1) | rvkrdhehndkvdphrhfnhlvrkgkkdrcgnndnpffkhhfvdreekvteagllffvsl |
| >EOA10535.1 | flekrdaiwmqkkirgfkggtetyqqmtnevfcrsrislpklkleslrtddwmlldmlne |
| | lvrcpkslydrlreedrarfrvpvdilsdeddtdgteedpfkntivrhqdrfpyfalryf |
| | dlkkvftslrfhidlgtyhfaiykknigeqpedrhltrnlygfgriqdfaeehrpeewkr |
| | lvrdldyfetgdkpyitqttphyhiekgkiglrfvpegqllwpspevgatrtgrskyaqd |
| | krftaeaflsvhelmpmmfyyfllrekyseeasaervqgrikrviedvyavydafargei |
| | dtldrldacladkgirrghlprqmiailsgehkdmeekvrkklqemiadtdhrldmldrq |
| | tdrkirigrknaglpksgviadwlvrdmmrfqpvakdtsgkpinnskansteyrmlqral |
| | alfggekerltpyfrqmnitggnnphpflhetrweshtnilsfyrsylkarkaflqsigr |
| | sdrvenhrflllkepktdrqtivagwkgefhlprgifteavrdcliemgldevgsykevg |
| | fmakavplyferackdrvqpfydypfnvgnslkpkkgrflskekraeewesgkerfrdle |
| | awshsaarriedafagienasrenkkkieqllqdlslwetfesklkvkadkiniaklkke |
| | ileakehpyldfkswqkferelrlvknqdiitwmmcrdlmeenkvegldtgtlylkdirt |
| | dvheqgslnvinrvkpmrlpvvvyradsrghvhkeqaplatvyieerdtkllkqgnfksf |
| | vkdrringlfsfvdtgalamegypisklrveyelakyqtarvcafeqtleleeslltryp |
| | hlpdknfrkmleswsdplldkwpdlhgnvrlliavrnafshnqypmydetlfssirkydp |
| | sspdaieermglniahrlseevkqakemveriiqa (SEQ ID NO: 622) |
| Porphyromonas | mtegnekpyngtyytledkhfwaaffnlarhnayitlahidrqlayskaditndedilff |
| gingivalis W50 | kgqwknldndlerkarlrslilkhfsflegaaygkklfesqssgnksskkkeltkkekee |
| (NZ_AJZS01000051.1) | lqanalsldnlksilfdflqklkdfrnyyshyrhpesselplfdgnmlqrlynvfdvsvq |
| >WP_005874195.1 | rvkrdhehndkvdphrhfnhlvrkgkkdkygnndnpffkhhfvdreekvteagllffvsl |
| | flekrdaiwmqkkirgfkggteayqqmtnevfcrsrislpklkleslrtddwmlldmlne |
| | lvrcpkslydrlreedrarfrvpvdilsdeddtdgteedpfkntivrhqdrfpyfalryf |
| | dlkkvftslrfhidlgtyhfaiykknigeqpedrhltrnlygfgriqdfaeehrpeewkr |
| | lvrdldyfetgdkpyitqttphyhiekgkiglrfvpegqllwpspevgatrtgrskyaqd |
| | krftaeaflsvhelmpmmfyyfllrekyseeasaekvqgrikrviedvyavydafardei |
| | ntrdeldacladkgirrghlprqmiailsgehkdmeekvrkklqemiadtdhrldmldrq |
| | tdrkirigrknaglpksgviadwlvrdmmrfqpvakdtsgkpinnskansteyrmlqral |
| | alfggekerltpyfrqmnitggnnphpflhetrweshtnilsfyrsylkarkaflqsigr |
| | sdreenhrflllkepktdrqtivagwksefhlprgifteavrdcliemgydevgsykevg |
| | fmakavplyferackdrvqpfydypfnvgnslkpkkgrflskekraeewesgkerfrdle |
| | awshsaarriedafvgieyaswenkkkieqllqdlslwetfesklkvkadkiniaklkke |
| | ileakehpyhdfkswqkferelrlvknqdiitwmmcrdlmeenkvegldtgtlylkdirt |
| | dvqeqgslnvinhvkpmrlpvvvyradsrghvhkeeaplatvyieerdtkllkqgnfksf |
| | vkdrringlfsfvdtgalamegypisklrveyelakyqtarvcafeqtleleeslltryp |
| | hlpdesfremleswsdplldkwpdlqrevrlliavrnafshnqypmydetifssirkydp |
| | ssldaieermglniahrlseevklakemveriiqa (SEQ ID NO: 623) |
| Porphyromonas | mtegnekpyngtyytledkhfwaaffnlarhnayitlahidrqlayskaditndedilff |
| gingivalis | kgqwknldndlerkarlrslilkhfsflegaaygkklfesqssgnksskkkeltkkekee |
| (NZ_CP011995.1) | lqanalsldnlksilfdflqklkdfrnyyshyrhpesselplfdgnmlqrlynvfdvsvq |
| >WP_052912312.1 | rvkrdhehndkvdphrhfnhlvrkgkkdkygnndnpffkhhfvdreekvteagllffvsl |
| | flekrdaiwmqkkirgfkggteayqqmtnevfcrsrislpklkleslrtddwmlldmlne |
| | lvrcpkllydrlreedrarfrvpvdilsdeddtdgteedpfkntivrhqdrfpyfalryf |
| | dlkkvftslrfhidlgtyhfaiykknigeqpedrhltrnlygfgriqdfaeehrpeewkr |
| | lvrdldyfetgdkpyitqttphyhiekgkiglrfvpegqllwpspevgatrtgrskyaqd |
| | krftaeaflsvhelmpmmfyyfllrekyseeasaekvqgrikrviedvyavydafardei |
| | ntrdeldacladkgirrghlprqmiailsgehkdmeekvrkklqemiadtdhrldmldrq |
| | tdrkirigrknaglpksgviadwlvrdmmrfqpvakdtsgkpinnskansteyrmlqral |
| | alfggekerltpyfrqmnitggnnphpflhetrweshtnilsfyrsylkarkaflqsigr |
| | sdreenhrflllkepktdrqtivagwksefhlprgifteavrdcliemgydevgsykevg |
| | fmakavplyferackdrvqpfydypfnvgnslkpkkgrflskekraeewesgkerfrdle |
| | awshsaarriedafvgieyaswenkkkieqllqdlslwetfesklkvkadkiniaklkke |
| | ileakehpyhdfkswqkferelrlvknqdiitwmmcrdlmeenkvegldtgtlylkdirt |
| | dvqeqgslnvinhvkpmrlpvvvyradsrghvhkeeaplatvyieerdtkllkqgnfksf |
| | vkdrringlfsfvdtgalamegypisklrveyelakyqtarvcafeqtleleeslltryp |
| | hlpdesfremleswsdplldkwpdlqrevrlliavrnafshnqypmydetifssirkydp |
| | ssldaieermglniahrlseevklakemveriiqa (SEQ ID NO: 624) |
| Porphyromonas | mtegnekpyngtyytledkhfwaaflnlarhnayitlahidrqlayskaditndedilff |
| gingivalis AJW4 | kgqwknldndlerkarlrslilkhfsflegaaygkklfesqssgnksskkkelskkekee |
| (NZ_CP011996.1) | lqanalsldnlksilfdflqklkdfrnyyshyrhpesselplfdgnmlqrlynvfdvsvq |
| >WP_053444417.1 | rvkrdhehndkvdphrhfnhlvrkgkkdkygnndnpffkhhfvdregtvteagllffvsl |
| | flekrdaiwmqkkirgfkggteayqqmtnevfcrsrislpklkleslrtddwmlldmlne |
| | lvrcpkslydrlreedrarfrvpvdilsdeddtdgteedpfkntivrhqdrfpyfalryf |
| | dlkkvftslrfhidlgtyhfaiykknigeqpedrhltrnlygfgriqdfaeehrpeewkr |
| | lvrdldyfetgdkpyitqttphyhiekgkiglrfvpegqhlwpspevgatrtgrskyaqd |
| | krltaeaflsvhelmpmmfyyfllrekyseevsaekvqgrikrviedvyavydafardei |
| | ntrdeldacladkgirrghlprqmiailsgehkdmeekvrkklqemiadtdhrldmldrq |
| | tdrkirigrknaglpksgvvadwlvrdmmrfqpvakdtsgkpinnskansteyrmlqral |
| | alfggekerltpyfrqmnitggnnphpflhetrweshtnilsfyrsylearkaflqsigr |
| | sdrvenhrflllkepktdrqtivagwkgefhlprgifteavrdcliemgydevgsykevg |
| | fmakavplyferaskdrvqpfydypfnvgnslkpkkgrflskekraeewesgkerfrlak |
| | lkkeileakehpyhdfkswqkferelrlvknqdiitwmmcrdlmeenkvegldtgtlylk |
| | dirtdvqeqgslnvinrvkpmrlpvvvyradsrghvhkeqaplatvyieerdtkllkqgn |
| | fksfvkdrringlfsfvdtgalamegypisklrveyelakyqtarvcafeqtleleesll |
| | tryphlpdknfrkmleswsdplldkwpdlhgnvrlliavrnafshnqypmydetlfssir |
| | kydpsspdaieermglniahrlseevkqakemveriiqa (SEQ ID NO: 625) |
| Porphyromonas | mtegnerpyngtyytledkhfwaaffnlarhnayitlahidrqlayskaditndedilff |
| gingivalis | kgqwknldndlerkarlrslilkhfsflegaaygkklfesqssgnksskkkeltkkekee |
| (NZ_CP007756.1) | lqanalsldnlksilfdflqklkdfrnyyshyrhpesselplfdgnmlqrlynvfdvsvq |
| >WP_039417390.1 | rvkrdhehndkvdphrhfnhlvrkgkkdrygnndnpffkhhfvdregtvteagllffvsl |
| | flekrdaiwmqkkirgfkggteayqqmtnevfcrsrislpklkleslrtddwmlldmlne |
| | lvrcpkslydrlreedrarfrvpidilsdeddtdgteedpfkntivrhqdrfpyfalryf |
| | dlkkvftslrfhidlgtyhfaiykknigeqpedrhltrnlygfgriqdfaeehrpeewkr |
| | lvrdldyfetgdkpyitqttphyhiekgkiglrfvpegqhlwpspevgatrtgrskyaqd |
| | krltaeaflsvhelmpmmfyyfllrekyseevsaekvqgrikrviedvyavydafargei |
| | dtldrldacladkgirrghlprqmiailsgehkdmeekvrkklqemiadtdhrldmldrq |
| | tdrkirigrknaglpksgviadwlvrdmmrfqpvakdtsgkpinnskansteyrmlqral |
| | alfggekerltpyfrqmnitggnnphpflhetrweshtnilsfyrsylkarkaflqsigr |
| | sdreenhrflllkepktdrqtivagwksefhlprgifteavrdcliemgydevgsykevg |
| | fmakavplyferackdrvqpfydypfnvgnslkpkkgrflskekraeewesgkerfrlak |
| | lkkeileakehpyldfkswqkferelrlvknqdiitwmmcrdlmeenkvegldtgtlylk |
| | dirtdvheqgslnvinrvkpmrlpvvvyradsrghvhkeqaplatvyieerdtkllkqgn |
| | fksfvkdrringlfsfvdtgalamegypisklrveyelakyqtarvcafeqtleleesll |
| | tryphlpdknfrkmleswsdplldkwpdlhrkvrlliavrnafshnqypmydeavfssir |
| | kydpsspdaieermglniahrlseevkqakemaeriiqv (SEQ ID NO: 626) |
| Porphyromonas | mtegnerpyngtyytledkhfwaaffnlarhnayitlthidrqlayskaditndedilff |
| gingivalis | kgqwknldndlerkarlrslilkhfsflegaaygkklfenkssgnksskkkeltkkekee |
| (NZ_LOEL01000001.1) | lqanalsldnlksilfdflqklkdfrnyyshyrhpesselplfdgnmlqrlynvfdvsvq |
| >WP_061156470.1 | rvkrdhehndkvdphrhfnhlvrkgkkdrcgnndnpffkhhfvdregkvteagllffvsl |
| | flekrdaiwmqkkirgfkggteayqqmtnevfcrsrislpklkleslrtddwmlldmlne |
| | lvrcpkslydrlreedrarfrvpvdilsdeddtdgteedpfkntivrhqdrfpyfalryf |
| | dlkkvftslrfhidlgtyhfaiykknigeqpedrhltrnlygfgriqdfaeehrpeewkr |
| | lvrdldyfetgdkpyitqttphyhiekgkiglrfvpegqhlwpspevgatrtgrskyaqd |
| | krltaeaflsvhelmpmmfyyfllrekyseevsaekvqgrikrviedvyavydafargei |
| | dtldrldacladkgirrghlprqmiailsgehkdmeekvrkklqemiadtdhrldmldrq |
| | tdrkirigrknaglpksgviadwlvrdmmrfqpvakdtsgkpinnskansteyrmlqral |
| | alfggekerltpyfrqmnitggnnphpflhetrweshtnilsfyrsylkarkaflqsigr |
| | sdreenhrflllkepktdrqtivagwksefhlprgifteavrdcliemgydevgsykevg |
| | fmakavplyferackdrvqpfydypfnvgnslkpkkgrflskekraeewesgkerfrlak |
| | lkkeileakehpyldfkswqkferelrlvknqdiitwmmcrdlmeenkvegldtgtlylk |
| | dirtevqeqgslnvinrvkpmrlpvvvyradsrghvhkeqaplatvyieerdtkllkqgn |
| | fksfvkdrringlfsfvdtgglamegypisklrveyelakyqtarvcafeqtleleesll |
| | trcphlpdknfrkmleswsdplldkwpdlqrevwlliavrnafshnqypmydeavfssir |
| | kydpsspdaieermglniahrlseevkqakemaeriiqa (SEQ ID NO: 627) |

TABLE 14

| | |
|---|---|
| Bacteroidetes | mengtqkgkgiyyyytknedkhyfgsflnl |
| bacterium | annniegiieefrirlslkdeknikeiinn |
| GWA2_31_9 | yftdkksytdwerginilkeylpvidyldl |
| (hypothetical | aitdkefekidlkgketakrkyfrtnfsll |
| protein | idtiidlrnfythyfhkpisinpdvakfld |
| A2033_10205) | knllnveldikkgkmktdktkgalkdgldk |
| >OFX18020 | elkklielkkaelkekkiktwnitenvega |
| | vyndafnhmvyknnagvtilkdyhksilpd |
| | dkidselklnfsisglvfllsmflskkeie |
| | gfksnlegfkgkvigengeyeiskfnnslk |
| | ymathwifsyltfkglkgrvkntfdketll |
| | mgmidelnkvphevygtlskeggnefledi |
| | neyvgdneenkksmensivvhpvirkrydd |
| | kfnyfairfldefanfptlkffvtagnfvh |
| | dkrekgiggsmltsdrmikekinvfgklte |
| | iakyksdyfsnentletsewelfpnpsyll |
| | ignnipvhidlihnteeakgegiaidrike |
| | ttnpakkrntrkskeeiikiiyqknknikY |
| | gdptallssnelpaliyellvnkksgkele |
| | niivekivngyktiagfekggnlsnslitk |
| | klkksepnedkinaekiilainreleiten |
| | klniiknnraefrtgakrkhifyskelgge |
| | atwiaydlkrfmpeasrkewkgfhhselgk |
| | flafydrnkndakallnmfwnfdndglign |
| | dlnsafrefhfdkfyekylikrdeilegfk |
| | sfisnfkdepkllkkgikdiyrvfdkryyi |
| | ikstnagkegllskpielprgifdnkptyi |
| | egvkvesnsalfadwygytysdkhefgsfy |
| | dmprdykegfekfelnniksignkknlnks |
| | dkfiyfrykqdlkikgiksgdlfiklmvde |
| | lfnvvfknnielnlkklygtsderfkngli |
| | advgknrekgdtsdnkmnenfiwnmtipls |
| | lenggieepkvklkdigkfrkletddkvig |
| | lleydkskvwkkleiedelenmpnsyerir |
| | rekllkgigefehfllekekfdginhpkhf |
| | egdlnpnfktyvingvlrknsklnyteidk |
| | lldlehisikdietsakeihlayflihvrn |
| | kfghnglpkleafelmkkyykknneetyae |
| | yfhkvssqivnefknslekhs(SEQ ID |
| | NO: 628) |
| Chryseobacterium | mektgtglgiyydhtklqdkyffggffnla |
| jejuense | gnnidnvikafiikffperkdkdiniagfl |
| (hypothetical | diefkdndadsdfqkknkflrihfpvigfl |
| protein | tsdndkagfkkkfalllktiselrnfythy |
| SAMN05421542_0666) | yhksiefpselfellddifvkttseikklk |
| >SDI27289.1 | kkddktggllnknlseeydirygggierlk |
| | elkaqgkrvsltdetairngvfnaafnhli |
| | yrdgenvkpsrlyqssysepdpaengisls |
| | qnsilfllsmflerketedlksrvkgfkak |
| | iikqgeegisglkfmathwvfsylcfkgik |
| | qklstefheetlliqiidelskvpdevysa |
| | fdsktkekfledineymkegnadlsledsk |
| | vihpvirkryenkfnyfairfldeylssts |
| | lkfqvhvgnyvhdrrvkhingtgfqteriv |
| | kdrikvfgrlsnisnlkadyikeqlelpnd |
| | sngweifpnpsyifidnnvpihvladeatk |
| | kgielfkdkrrkeqpeelqkrkgkiskyni |
| | vsmiykeakgkdklrideplallslneipa |
| | llyqilekgatpkdieliiknklterfeki |
| | knydpetpapasqiskrlrnnttakgqeal |
| | naeklslliereientetklssieekrlka |
| | kkeqrrntpqrsifsnsdlgriaawladdi |
| | krfmpaeqrknwkgyqhsqlqqslayfekr |
| | pqeaflllkegwdtsdgssywnnwvmnsfl |
| | ennhfekfyknylmkrvkyfselagnikqh |
| | thntkflrkfikqqmpadlfpkrhyilkdl |
| | eteknkvlskplvfsrglfdnnptfikgvk |
| | vtenpelfaewysygyktehvfqhfygwer |
| | dynelldselqkgnsfaknsiyynresqld |
| | liklkqdlkikkikiqdlflkriaeklfen |
| | vfnypttlsldefyltqeeraekerialaq |
| | slreegdnspniikddfiwsktiafrskqi |
| | yepaiklkdigkfnrfvlddeeskasklls |
| | ydknkiwnkeqlerelsigensyevirrek |
| | lfkeignlelqilsnwswdginhprefeme |
| | dqkntrhpnfkmylvngilrkninlykede |
| | dfwleslkendfktlpsevletksemvqll |
| | flvilirnqfahnqlpeiqfynfirknype |
| | iqnntvaelylnliklavqklkdns (SEQ |
| | ID NO: 629) |
| Chryseobacterium | mntrvtgmgvsydhtkkedkhffggflnla |
| carnipullonun | qdnitavikafcikfdknpmssvqfaescf |
| (hypothetical | tdkdsdtdfqnkvryvrthlpvigylnygg |
| protein | drntfrqklstllkavdslrnfythyyhsp |
| SAMN05444360_11366) | lalstelfelldtvfasvavevkqhkmkdd |
| >SHM52812.1 | ktrqllskslaeeldirykqqlerlkelke |
| | qgknidlrdeagirngvinaafnhliykeg |
| | eiakptlsyssfyygadsaengitisqsgl |
| | lfllsmflgkkeiedlksrirgfkakivrd |
| | geenisglkfmathwifsylsfkgmkgrls |
| | tdfheetlliqiidelskvpdevyhdfdta |
| | trekfvedineyiregnedfslgdstiihp |
| | virkryenkfnyfavrfldefikfpslrfq |
| | vhlgnfvhdrrikdihgtgfqtervvkdri |
| | kvfgklseisslkteyiekeldldsdtgwe |
| | ifpnpsyvfidnnipiyistnktfkngsse |
| | fiklrrkekpeemkmrgedkkekrdiasmi |
| | gnagslnsktplamlslnempallyeilvk |
| | kttpeeieliikekldshfeniknydpekp |
| | lpasqiskrlrnnttdkgkkvinpeklihl |
| | inkeidateakfallaknrkelkekfrgkp |
| | lrqtifsnmelgreatwladdikrfmpdil |
| | rknwkgyqhnqlqqslaffnsrpkeaftil |
| | qdgwdfadgssfwngwiinsfvknrsfeyf |
| | yeayfegrkeyfsslaenikqhtsnhrnlr |
| | rfidqqmpkglfenrhyllenleteknkil |
| | skplvfprglfdtkptfikgikvdeqpelf |
| | aewyqygystehvfqnfygwerdyndlles |
| | elekdndfsknsihysrtsqleliklkqdl |
| | kikkikiqdlflkliaghifenifkypasf |
| | sldelyltqeerinkeqealiqsqrkegdh |
| | sdniikdnfigsktvtyeskqisepnvklk |
| | digkfnrfllddkvktllsynedkvwnknd |
| | ldlelsigensyevirreklfkkiqnfelq |
| | tltdwpwngtdhpeefgttdnkgvnhpnfk |
| | myvvngilrkhtdwfkegednwlenlneth |
| | fknlsfqeletksksiqtafliimirnqfa |
| | hnqlpavqffefiqkkypeiggsttselyl |
| | nfinlavvellellek (SEQ ID NO: |
| | 630) |
| Chryseobacterium | metqilgngisydhtktedkhffggflnta |
| ureilyticum | qnnidllikayiskfessprklnsvqfpdv |
| (hypothetical | cfkkndsdadfqhklqfirkhlpviqylky |
| protein | ggnrevlkekfrlllqavdslrnfythfyh |
| SAMN05421786_1011119) | kpiqlpnelltlldtifgeignevrqnkmk |
| >SIS70481.1 | ddktrhllkknlseeldfryqeqlerlrkl |
| | ksegkkvdlrdteairngvinaafnhlifk |
| | daedfkptvsyssyyydsdtaengisisqs |
| | gllfllsmflgrremedlksrvrgfkarii |
| | kheeqhvsglkfmathwvfsefcfkgiktr |
| | lnadyheetlliglidelskvpdelyrsfd |
| | vatrerfiedineyirdgkedkslieskiv |
| | hpvirkryeskfnyfairfldefvnfptlr |
| | fqvhagnyvhdrriksiegtgfkterlvkd |
| | rikvfgklstisslkaeylakavnitddtg |
| | wellphpsyvfidnnipihltvdpsfkngv |
| | keyqekrklqkpeemknrqggdkmhkpais |
| | skigkskdinpespvallsmneipallyei |
| | lvkkaspeeveakirqkltavferirdydp |
| | kvplpasqvskrlrnntdtlsynkeklvel |
| | ankeveqterklalitknrrecrekvkgkf |
| | krqkvfknaelgteatwlandikrfmpeeq |
| | kknwkgyqhsqlqqslaffesrpgearsll |
| | qagwdfsdgssfwngwvmnsfardntfdgf |
| | yesylngrmkyflrladniaqqsstnklis |
| | nfikqqmpkglfdrrlymledlateknkil |
| | skplifprgifddkptfkkgvqvseepeaf |
| | adwysygydvkhkfqefyawdrdyeellre |
| | elekdtaftknsihysresqiellakkqdl |
| | kvkkvriqdlylklmaeflfenvfghelal |
| | pldqfyltqeerlkqeqeaivqsqrpkgdd |
| | spnivkenfiwsktipfksgrvfepnvklk |
| | digkfrnlltdekvdillsynnteigkqvi |
| | eneliigagsyefirreqlfkeiqqmkrls |
| | lrsvrgmgvpirinlk (SEQ ID NO: |
| | 631) |
| Sinomicrobium | mestttlglhlkyqhdlfedkhyfgggvnl |
| oceani | avgniesifqafaerygiqnplrkngvpai |
| >WP_072319476.1 | nnifhdnisisnykeylkflkqylpvvgfl |
| | eksneinifefredfeilinaiyklrhfyt |
| | hyyhspikledrfytclnelfvavaiqvkk |
| | hkmksdktrqllnknlhqllqqlieqkrek |
| | lkdkkaegekvsldtksienavindafvhl |
| | ldkdenirinyssrlsediitkngitlsis |
| | gllfllslflqrkeaedlrsriegfkgkgn |
| | elrfmathwvfsylnvkrikhrintdfqke |
| | tlligiadelskvpdevyktldhenrskfl |
| | edineyiregnedaslnestvvhgvirkry |
| | enkfhylvlryldefvdfpslrfqvhlgny |
| | ihdrrdkvidgtnfitnrvikepikvfgkl |
| | shvsklksdymeslsrehkngwdvfpnpsy |
| | nfvghnipifinlrsasskgkelyrdlmki |
| | ksekkkksreegipmerrdgkptkieisnq |
| | idrnikdnnfkdiypgeplamlslnelpal |
| | lfellrrpsitpqdiedrmveklyerfqii |
| | rdykpgdglstskiskklrkadnstrldgk |
| | kllraiqtetrnareklhtleenkalqknr |
| | krrtvyttreqgreaswlaqdlkrfmpias |
| | rkewrgyhhsqlqqilafydqnpkqplell |
| | eqfwdlkedtyvwnswihkslsqhngfvpm |
| | yegylkgrlgyykklesdiigfleehkvlk |
| | ryytqqhlnvifrerlyfiktetkqklell |
| | arplvfprgifddkptfvqdkkvvdhpelf |
| | adwyvysykddhsfqefyhykrdyneifet |
| | elswdidfkdnkrqlnpseqmdlfrmkwdl |
| | kikkikiqdiflkivaediylkifghkipl |
| | slsdfyisrgerltldeqavaqsmrlpgdt |
| | ksenqikesnlwqttvpyekeqirepkikl |
| | digkfkyflqqqkvinllkydpqhvwtkae |
| | leeelyigkhsyevvrremllqkchqlekh |
| | ilegfrfdgsnhpreleggnhpnfkmyivn |
| | giltkrgeleieaenwwlelgnsknsldkv |
| | evelltmktipeqkafllilirnkfahnql |
| | padnyfhyasnlmnlkksdtyslfwftvad |
| | tivqefmsl (SEQ ID NO: 632) |
| Reichenbachiella | mktnpliassgekpnykkfntesdksfkki |
| agariperforans | fqnkgsiapiaekacknfeikskspvnrdg |
| >WP073124441.1 | rlhyfsvghafknidsknvfryeldesqmd |
| | mkptqflalqkeffdfqgalngllkhirnv |
| | nshyvhtfekleiqsinqklitflieafel |
| | avihsylneeelsyeaykddpqsgqklvqf |
| | lcdkfypnkeheveerktilaknkrgaleh |
| | sllfievtsdidwklfekhkvftisngkyl |
| | fhaclfllslflykseangliskikgfkrn |
| | ddnqyrskrqiftffskkftsqdvnseeqh |
| | lvkfrdviqylnhypsawnkhlelksgypq |
| | mtdklmryiveaelyrsfpdqtdnhrfllf |
| | aireffgqscldtwtgntpinfsnqeqkgf |
| | syeintsaeikdietklkalvlkgpinfke |
| | kkeqnrlekdlrrekkeqptnrvkeklltr |
| | ighnmlyvsygrnqdrfmdfaarflaetdy |
| | fgkdakfkmyqfytsdeqrdhlkeqkkelp |
| | kkefeklkyhqsklvdyftyaeqqarypdw |
| | dtpfvvennaiqikvtlfngakkivsvqrn |
| | lmlylledalysekrenagkglisgyfvhh |
| | qkelkdqldileketeisreqkrefkkllp |
| | krilhryspaqindttewnpmevileeaka |
| | qeqryqlllekailhqteedflkrnkgkqf |
| | klrfvrkawhlmylkelymnkvaehghhks |
| | fhitkeefndfcrwmfafdevpkykeylcd |
| | yfsqkgffnnaefkdliesstslndlyekt |
| | kqrfegwskdltkqsdenkyllanyesmlk |
| | ddmlyvnishfisyleskgkinrnahghia |
| | ykalnnvphlieeyyykdrlapeeykshgk |
| | lynklktvkledallyemamhylslepalv |
| | pkvktkvkdilssniafdikdaaghhlyhl |
| | lipfhkidsfvalinhqsqqekdpdktsfl |
| | akiqpylekvknskdlkavyhyykdtphtl |
| | ryedlnmihshivsgsvqftkvalkleeyf |
| | iakksitlqiargisyseiadlsnyftdev |
| | rntafhfdvpetaysmilqgiesefldrei |
| | kpqkpkslselstqqvsvctafletlhnnl |
| | fdrkddkkerlskareryfeqin(SEQ ID |
| | NO: 633) |

### * * *

[0883] While preferred embodiments of the present invention have been shown and described herein, it will be obvious to those skilled in the art that such embodiments are provided by way of example only. Numerous variations, changes, and substitutions will now occur to those skilled in the art without departing from the invention. It should be understood that various alternatives to the embodiments of the invention described herein may be employed in practicing the invention. It is intended that the following claims define the scope of the invention and that methods and structures within the scope of these claims and their equivalents be covered thereby.

1-50. (canceled)

51. A non-naturally occurring or engineered composition comprising;
i) a Type VI-B Cas protein optimized for activity in a mammalian cell, and
ii) one or more nucleic acid components, the one or more nucleic acid components capable of forming a complex with the Type VI-B Cas protein and comprising a guide sequence capable of directing site specific binding of the complex to a target RNA polynucleotide sequence.

52. The composition of claim 51, wherein the Type VI-B Cas protein is fused to one or more localization signals.

53. The composition of claim 52, wherein the localization signal is a nuclear localization signal (NLS) or a nuclear export signal (NES)

54. The composition of claim 51, wherein the Type VI-B Cas protein comprises two HEPN domains.

55. The composition of claim 51, wherein the Type VI-B Cas protein is associated with one or more functional domains.

56. The composition of claim 55, wherein the functional domain modifies transcription of translation of the target sequence.

57. The composition of claim 56, wherein the functional domain comprises a cytosine or adenosine deaminase.

58. The composition of claim 51, wherein the nucleic acid component comprises a dual direct repeat sequence.

59. The composition of claim 51, wherein the Type VI-B Cas protein is selected from the group consisting of Porphyromonas gulae Cas13b (accession number WP_039434803), Prevotella sp. P5-125 Cas13b (accession number WP_044065294), Porphyromonas gingivalis Cas13b (accession number WP_053444417), Porphyromonas sp. COT-052 OH4946 Cas13b (accession number WP_039428968), Bacteroides pyogenes Cas13b (accession number WP_034542281), and Riemerella anatipestifer Cas13b (accession number WP_004919755).

60. The composition of claim 59, wherein the Type VI-B Cas protein is Porphyromonas gulae Cas13b (accession number WP_039434803), or Prevotella sp. P5-125 Cas13b (accession number WP_044065294).

61. The composition of claim 51, wherein the Type VI-B Cas protein contains one or more mutations within a HEPN domain corresponding to R116, H121, R1177, or H1182 corresponding to the amino acid positions of Type VI-B Bergeyella zoohelcum ATCC 43767.

62. The composition of claim 51, wherein the one or more polynucleotide molecules comprise one or more regulatory elements operably configured to express the polypeptides and/or the nucleic acid component(s), optionally wherein the one or more regulatory elements comprise a promoter(s) or inducible promotor(s).

63. The composition of claim 62, wherein the one or more polynucleotide molecules are comprised within one or more vectors.

64. The composition of claim 62, wherein the composition is comprised in a delivery system.

65. A method of targeting a locus of interest in a eukaryotic cell, the method comprising delivering to said locus a non-naturally occurring or engineered composition non-naturally occurring or engineered composition comprising
i) a Type VI-B Cas protein optimized for activity in a mammalian cell; and
ii) one or more nucleic acid components, the one or more nucleic acid components capable of forming a complex with the Type VI-B Cas protein and comprising a guide sequence capable of directing site specific binding of the complex to a target RNA polynucleotide sequence.

66. The method of claim 65, wherein the targeting is in vivo or ex vivo.

67. The method of claim 65, wherein the Type VI-B Cas protein is fused to one or more localization signals.

68. The method of claim 67, wherein the localization signal is a nuclear localization signal (NLS) or a nuclear export signal (NES)

69. The method of claim 65, wherein the Type VI-B Cas protein contains one or more mutations within a HEPN domain corresponding to R116, H121, R1177, or H1182 corresponding to the amino acid positions of Type VI-B Bergeyella zoohelcum ATCC 43767.

70. The method of claim 65, wherein the Type VI-B Cas protein is associated with one or more functional domains.

71. The method of claim 71, wherein the functional domain is cytosine or adenosine deaminase functional domain associated with the Type VI-B Cas protein, and the target RNA sequence comprises one or more Adenine or Cytidine.

72. A detection composition comprising:
a non-target polynucleotide comprising a detectable marker;
a Type VI Cas protein or one or more nucleic acid sequences encoding the Type VI Cas protein; and
at least one guide polynucleotide designed to form a complex with a CRISPR-Cas protein and comprising a guide sequence capable of hybridizing with a target sequence, or one or more nucleic sequences encoding the at least one guide polynucleotide.

73. A method of detecting target nucleic acid in a sample, comprising:
contacting one or more samples comprising one or more target sequences with;
i) a Type VI Cas protein;
ii) at least one guide polynucleotide designed to form a complex with the Type VI Cas protein and comprising a guide sequence, wherein the guide sequence is capable of hybridizing with a target sequence; and
iii) a non-target polynucleotide comprising a detectable marker; and
detecting a signal from cleavage of the non-target sequence, thereby detecting the one or more target nucleic acid sequences in the sample.

The application's sequence listing, which the Patent Office published only in electronic form, follows.

SEQUENCE LISTING (633 sequences)

SEQ ID NO: 1 - protein, 15 aa, Artificial Sequence
  Synthetic Peptide
  misc_feature (4)..(4): Xaa can be any naturally occurring amino acid
DKHXFGAFLNLARHN

SEQ ID NO: 2 - protein, 12 aa, Artificial Sequence
  Synthetic Peptide
GLLFFVSLFLDK

SEQ ID NO: 3 - protein, 7 aa, Artificial Sequence
  Synthetic Peptide
  misc_feature (4)..(4): Xaa can be any naturally occurring amino acid
SKIXGFK

SEQ ID NO: 4 - protein, 10 aa, Artificial Sequence
  Synthetic Peptide
  misc_feature (7)..(7): Xaa can be any naturally occurring amino acid
DMLNELXRCP

SEQ ID NO: 5 - protein, 15 aa, Artificial Sequence
  Synthetic Peptide
  misc_feature (2)..(2): Xaa can be any naturally occurring amino acid
  misc_feature (14)..(14): Xaa can be any naturally occurring amino acid
RXZDRFPYFALRYXD

SEQ ID NO: 6 - protein, 10 aa, Artificial Sequence
  Synthetic Peptide
  misc_feature (9)..(9): Xaa can be any naturally occurring amino acid
LRFQVBLGXY

SEQ ID NO: 7 - protein, 10 aa, Artificial Sequence
  Synthetic Peptide
GLLFFVSLFL

SEQ ID NO: 8 - protein, 9 aa, Artificial Sequence
  Synthetic Peptide
  misc_feature (4)..(4): Xaa can be any naturally occurring amino acid
RHQXRFPYF

SEQ ID NO: 9 - protein, 8 aa, Artificial Sequence
  Synthetic Peptide
RHQDRFPY

SEQ ID NO: 10 - RNA, 45 nt, Cypridina noctiluca
auugaaugcagaguagaggccgcaggauaguuuagaacauucuau

SEQ ID NO: 11 - RNA, 66 nt, Cypridina noctiluca
ucuaaaccauccugcggccucuacucugcaguuguggaagguccaguuuugggggcuauuacaaca

SEQ ID NO: 12 - DNA, 105 bp, Cypridina noctiluca
tgccgaaugugucaguauguaauugaaugcagaguagaggccgcaggauaguuuagaacauucuauggaaagagauuccaguuccaggaaccugguacauacgug

SEQ ID NO: 13 - RNA, 24 nt, Artificial Sequence
  Synthetic Oligonucleotide
  misc_feature (1)..(4): n is a, c, g, or u
nnnngacuacagucccgaaacuag

SEQ ID NO: 14 - RNA, 65 nt, Artificial Sequence
  Synthetic Oligonucleotide
ucgucuaugugcugugcugggcacccuucuuccuggugcagcuguaggccgcgugggacccggag

SEQ ID NO: 15 - RNA, 50 nt, Artificial Sequence
  Synthetic Oligonucleotide
gucccacgcggcccacagcugcaccaggaagaagggugcccagcacagca

SEQ ID NO: 16 - RNA, 50 nt, Artificial Sequence
  Synthetic Oligonucleotide
gggucccacgcggcccacagcugcaccaggaagaagggugcccagcacag

SEQ ID NO: 17 - RNA, 50 nt, Artificial Sequence
  Synthetic Oligonucleotide
ccgggucccacgcggcccacagcugcaccaggaagaagggugcccagcac

SEQ ID NO: 18 - RNA, 65 nt, Artificial Sequence
  Synthetic Oligonucleotide
ccucaacuuccugcucugggcuccuggaggccacacgaucgccuaggaugucaucacccugaugg

SEQ ID NO: 19 - RNA, 50 nt, Artificial Sequence
  Synthetic Oligonucleotide
ggugaugacaucccaggcgaucguguggccuccaggagcccagagcagga

SEQ ID NO: 20 - RNA, 50 nt, Artificial Sequence
  Synthetic Oligonucleotide
agggugaugacaucccaggcgaucguguggccuccaggagcccagagcag

SEQ ID NO: 21 - RNA, 50 nt, Artificial Sequence
  Synthetic Oligonucleotide
aucagggugaugacaucccaggcgaucguguggccuccaggagcccagag

SEQ ID NO: 22 - RNA, 99 nt, Artificial Sequence
  Synthetic Oligonucleotide
cccaggugcgggagagaggccugcugaaaaugacugaauauaaacuugugguaguuggagcugguggcguaggcaagagugccuugacgauacagcuaa

SEQ ID NO: 23 - RNA, 50 nt, Artificial Sequence
  Synthetic Oligonucleotide
caccacaaguuuauauucagucauuuucagcaggccucucucccgcaccu

SEQ ID NO: 24 - RNA, 50 nt, Artificial Sequence
  Synthetic Oligonucleotide
gcuccaaccaccacaaguuuauauucagucauuuucagcaggccucucuc

SEQ ID NO: 25 - RNA, 50 nt, Artificial Sequence
  Synthetic Oligonucleotide
cgccaccagcuccaaccaccacaaguuuauauucagucauuuucagcagg

SEQ ID NO: 26 - RNA, 50 nt, Artificial Sequence
  Synthetic Oligonucleotide
cuugccuacgccaccagcuccaaccaccacaaguuuauauucagucauuu

SEQ ID NO: 27 - RNA, 50 nt, Artificial Sequence
  Synthetic Oligonucleotide
aaggcacucuugccuacgccaccagcuccaaccaccacaaguuuauauuc

SEQ ID NO: 28 - DNA, 50 bp, Artificial Sequence
  Synthetic Oligonucleotide
guatcgucaaggcacucuugccuacgccaccagcuccaaccaccacaagu

SEQ ID NO: 29 - RNA, 50 nt, Artificial Sequence
  Synthetic Oligonucleotide
aauuagcuguaucgucaaggcacucuugccuacgccaccagcuccaacca

SEQ ID NO: 30 - RNA, 20 nt, Artificial Sequence
  Synthetic Oligonucleotide
uuccccacauuagacguuca

SEQ ID NO: 31 - RNA, 20 nt, Artificial Sequence
  Synthetic Oligonucleotide
ugaacggccaauguggggaa

SEQ ID NO: 32 - DNA, 44 bp, Cypridina noctiluca
tatgtaattgaatgcagagtagaggccgcaggatagtttagaac

SEQ ID NO: 33 - DNA, 36 bp, Cypridina noctiluca
tatgtaattgaatgcagccgcaggatggtttggagc

SEQ ID NO: 34 - DNA, 37 bp, Cypridina noctiluca
tatgtaattgaatgcagaccgcaggatagtttagaac

SEQ ID NO: 35 - DNA, 38 bp, Cypridina noctiluca
tatgtaattgaatgcagagccgcaggatggtttggaac

SEQ ID NO: 36 - DNA, 38 bp, Cypridina noctiluca
tatgtaattgaatgcagagtggaaggatagtttagaac

SEQ ID NO: 37 - DNA, 38 bp, Cypridina noctiluca
tatgtaattgaatgcagagtagaaggatggtttagaac

SEQ ID NO: 38 - DNA, 38 bp, Cypridina noctiluca
tgtgtaattgaatgcagagtggaaggatggtttagaac

SEQ ID NO: 39 - DNA, 38 bp, Cypridina noctiluca
tatgtaattgaatgcagagtggaagggtggtttggaac

SEQ ID NO: 40 - DNA, 38 bp, Cypridina noctiluca; identical to SEQ ID NO: 37

SEQ ID NO: 41 - DNA, 39 bp, Cypridina noctiluca
tatgtaattgaatgcagagtagagaggatggtttggaac

SEQ ID NO: 42 - DNA, 39 bp, Cypridina noctiluca
tgtgtaattgaatgcagagtggagaggatggtttagaac

SEQ ID NO: 43 - DNA, 39 bp, Cypridina noctiluca
tatgtaattgaatgcagagtggagaggatggtttagagc

SEQ ID NO: 44 - DNA, 39 bp, Cypridina noctiluca
tatgtaattgaatgcagagtagagaggatggtttagaac

SEQ ID NO: 45 - DNA, 39 bp, Cypridina noctiluca
tatgtaattgaatgcagagtggaggccgcggtttggaac

SEQ ID NO: 46 - DNA, 39 bp, Cypridina noctiluca
tatgtaattgaatgcagagtagagaccgcggtttggagc

SEQ ID NO: 47 - DNA, 39 bp, Cypridina noctiluca
tatgtaattgaatgcagagtggaggccgcagtttggagc

SEQ ID NO: 48 - DNA, 39 bp, Cypridina noctiluca
tatgtaattgaatgcagagtagaggccgcaggttggaac

SEQ ID NO: 49 - DNA, 39 bp, Cypridina noctiluca
tgtgtaattgaatgcagagtggaggccgcaggttagaac

SEQ ID NO: 50 - DNA, 39 bp, Cypridina noctiluca
tatgtaattgaatgcagagtggaggccgcaggttggaac

SEQ ID NO: 51 - DNA, 39 bp, Cypridina noctiluca; identical to SEQ ID NO: 50

SEQ ID NO: 52 - DNA, 38 bp, Cypridina noctiluca
tatgtaattgaatgcagagtagaggccgcaggtggagc

SEQ ID NO: 53 - DNA, 44 bp, Cypridina noctiluca; identical to SEQ ID NO: 32

SEQ ID NO: 54 - DNA, 39 bp, Cypridina noctiluca
tatgtaattgaatgcagagtccgcaggatggtttagaac

SEQ ID NO: 55 - DNA, 38 bp, Cypridina noctiluca
tatgtaattgaatgcagagtagcaggatagtttagaac

SEQ ID NO: 56 - DNA, 38 bp, Cypridina noctiluca
tatgtaattgaatgcagagtagaaggatagtttagaac

SEQ ID NO: 57 - DNA, 39 bp, Cypridina noctiluca
tatgtaattgaatgcagagtagagaggatagtttagaac

SEQ ID NO: 58 - DNA, 39 bp, Cypridina noctiluca; identical to SEQ ID NO: 44

SEQ ID NO: 59 - DNA, 39 bp, Cypridina noctiluca; identical to SEQ ID NO: 44

SEQ ID NO: 60 - DNA, 39 bp, Cypridina noctiluca; identical to SEQ ID NO: 57

SEQ ID NO: 61 - DNA, 38 bp, Cypridina noctiluca
tatgtaattgaatgcagagtagaggcatggtttagaac

SEQ ID NO: 62 - DNA, 39 bp, Cypridina noctiluca
tatgtaattgaatgcagagtagaggccatagtttagaac

SEQ ID NO: 63 - DNA, 39 bp, Cypridina noctiluca
tatgtaattgaatgcagagtagaggccatggtttagaac

SEQ ID NO: 64 - DNA, 38 bp, Cypridina noctiluca
tatgtaattgaatgcagagtagaggcctagtttagaac

SEQ ID NO: 65 - DNA, 38 bp, Cypridina noctiluca
tatgtaattgaatgcagagtagaggcctggtttagaac

SEQ ID NO: 66 - DNA, 39 bp, Cypridina noctiluca
tatgtaattgaatgcagagtagaggccgcagtttagaac

SEQ ID NO: 67 - DNA, 39 bp, Cypridina noctiluca
tatgtaattgaatgcagagtagaggccgcaggttagaac

SEQ ID NO: 68 - DNA, 39 bp, Cypridina noctiluca; identical to SEQ ID NO: 67

SEQ ID NO: 69 - DNA, 36 bp, Cypridina noctiluca
taattgaatgcagagtagaggccgcaggaggtttag

SEQ ID NO: 70 - DNA, 37 bp, Cypridina noctiluca
attgaatgcagagtagaggccgcaggatggtttagaa

SEQ ID NO: 71 - DNA, 37 bp, Cypridina noctiluca
attgaatgcagagtagaggccgcaggatggtttagga

SEQ ID NO: 72 - DNA, 37 bp, Cypridina noctiluca; identical to SEQ ID NO: 70

SEQ ID NO: 73 - DNA, 37 bp, Cypridina noctiluca; identical to SEQ ID NO: 70

SEQ ID NO: 74 - RNA, 39 nt, Artificial Sequence
  Synthetic Oligonucleotide
  misc_feature (4)..(5): n is a, c, g, or u
  misc_feature (36)..(39): n is a, c, g, or u
augnnuugccaccgacgacaccgugaggauaaauunnnn

SEQ ID NO: 75 - RNA, 36 nt, Artificial Sequence
  Synthetic Oligonucleotide
uggaggugcucaaagagauggaagccaaugcccgga

SEQ ID NO: 76 - RNA, 36 nt, Artificial Sequence
  Synthetic Oligonucleotide
  misc_feature (1)..(1): n is a, c, g, or u
nggaggugcucaaagagauggaagccaaugcccgga

SEQ ID NO: 77 - RNA, 36 nt, Artificial Sequence
  Synthetic Oligonucleotide
  misc_feature (2)..(2): n is a, c, g, or u
ungaggugcucaaagagauggaagccaaugcccgga

SEQ ID NO: 78 - RNA, 36 nt, Artificial Sequence
  Synthetic Oligonucleotide
  misc_feature (3)..(3): n is a, c, g, or u
ugnaggugcucaaagagauggaagccaaugcccgga

SEQ ID NO: 79 - RNA, 36 nt, Artificial Sequence
  Synthetic Oligonucleotide
  misc_feature (4)..(4): n is a, c, g, or u
uggnggugcucaaagagauggaagccaaugcccgga

SEQ ID NO: 80 - RNA, 36 nt, Artificial Sequence
  Synthetic Oligonucleotide
  misc_feature (18)..(18): n is a, c, g, or u
uggaggugcucaaagagnuggaagccaaugcccgga

SEQ ID NO: 81 - RNA, 36 nt, Artificial Sequence
  Synthetic Oligonucleotide
  misc_feature (36)..(36): n is a, c, g, or u
uggaggugcucaaagagauggaagccaaugcccggn

SEQ ID NO: 82 - RNA, 36 nt, Artificial Sequence
  Synthetic Oligonucleotide
  misc_feature (1)..(2): n is a, c, g, or u
nngaggugcucaaagagauggaagccaaugcccgga

SEQ ID NO: 83 - RNA, 36 nt, Artificial Sequence
  Synthetic Oligonucleotide
  misc_feature (1)..(1): n is a, c, g, or u
  misc_feature (3)..(3): n is a, c, g, or u
ngnaggugcucaaagagauggaagccaaugcccgga

SEQ ID NO: 84 - RNA, 36 nt, Artificial Sequence
  Synthetic Oligonucleotide
  misc_feature (1)..(1): n is a, c, g, or u
  misc_feature (4)..(4): n is a, c, g, or u
nggnggugcucaaagagauggaagccaaugcccgga

SEQ ID NO: 85 - RNA, 36 nt, Artificial Sequence
  Synthetic Oligonucleotide
  misc_feature (1)..(1): n is a, c, g, or u
  misc_feature (5)..(5): n is a, c, g, or u
nggangugcucaaagagauggaagccaaugcccgga

SEQ ID NO: 86 - RNA, 36 nt, Artificial Sequence
  Synthetic Oligonucleotide
  misc_feature (14)..(14): n is a, c, g, or u
  misc_feature (18)..(18): n is a, c, g, or u
uggaggugcucaangagnuggaagccaaugcccgga

SEQ ID NO: 87 - RNA, 36 nt, Artificial Sequence
  Synthetic Oligonucleotide
  misc_feature (35)..(36): n is a, c, g, or u
uggaggugcucaaagagauggaagccaaugcccgnn

SEQ ID NO: 88 - RNA, 36 nt, Artificial Sequence; identical to SEQ ID NO: 75
  Synthetic Oligonucleotide

SEQ ID NO: 89 - RNA, 34 nt, Artificial Sequence
  Synthetic Oligonucleotide
agagauggaagccaaugcccggaaagcuggcugc

SEQ ID NO: 90 - RNA, 36 nt, Artificial Sequence; identical to SEQ ID NO: 75
  Synthetic Oligonucleotide

SEQ ID NO: 91 - RNA, 34 nt, Artificial Sequence; identical to SEQ ID NO: 89
  Synthetic Oligonucleotide

SEQ ID NO: 92 - RNA, 34 nt, Artificial Sequence; identical to SEQ ID NO: 89
  Synthetic Oligonucleotide

SEQ ID NO: 93 - RNA, 34 nt, Artificial Sequence; identical to SEQ ID NO: 89
  Synthetic Oligonucleotide

SEQ ID NO: 94 - RNA, 56 nt, Artificial Sequence
  Synthetic Oligonucleotide
aguauguaauugaaugcagaguagaggccgcaggauaguuuagaacauucuaugga

SEQ ID NO: 95 - RNA, 50 nt, Artificial Sequence
  Synthetic Oligonucleotide
  misc_feature (17)..(17): n is a, c, g, or u
auagaauguucuaaacnauccugcggccucuacucugcauucaauuacau

SEQ ID NO: 96 - RNA, 59 nt, Artificial Sequence
  Synthetic Oligonucleotide
auguaauugaaugcagaguagaggccgcaggauaguuuagaacauucuauggaaagaga

SEQ ID NO: 97 - RNA, 83 nt, Artificial Sequence
  Synthetic Oligonucleotide
ucuuuccauaggcccugaaaaagggccuguucuaaaccauccugcggccucuacucggcccugaaaaagggccauucaauuac

SEQ ID NO: 98 - RNA, 21 nt, Artificial Sequence
  Synthetic Oligonucleotide
ggccgcaggauaguuuagaac

SEQ ID NO: 99 - RNA, 82 nt, Artificial Sequence
  Synthetic Oligonucleotide
accgguggaauaguauaacaauaugcaaaauguuguuauaguaucccaccucuaaaccauccugcggggcccuagggcccuu

SEQ ID NO: 100 - protein, 7 aa, Simian virus 40
PKKKRKV

SEQ ID NO: 101 - protein, 16 aa, Simian virus 40
KRPAATKKAGQAKKKK

SEQ ID NO: 102 - protein, 9 aa, Homo sapiens
PAAKRVKLD

SEQ ID NO: 103 - protein, 11 aa, Homo sapiens
RQRRNELKRSP

SEQ ID NO: 104 - protein, 38 aa, Homo sapiens
NQSSNFGPMKGGNFGGRSSGPYGGGGQYFAKPRNQGGY

SEQ ID NO: 105 - protein, 42 aa, Homo sapiens
RMRIZFKNKGKDTAELRRRRVEVSVELRKAKKDEQILKRRNV

SEQ ID NO: 106 - protein, 8 aa, Homo sapiens
VSRKRPRP

SEQ ID NO: 107 - protein, 8 aa, Homo sapiens
PPKKARED

SEQ ID NO: 108 - protein, 8 aa, Homo sapiens
PQPKKKPL

SEQ ID NO: 109 - protein, 12 aa, Mus sp.
SALIKKKKKMAP

SEQ ID NO: 110 - protein, 5 aa, Influenza virus
DRLRR

SEQ ID NO: 111 - protein, 7 aa, Influenza virus
PKQKKRK

SEQ ID NO: 112 - protein, 10 aa, Hepatitis D virus
RKLKKKIKKL

SEQ ID NO: 113 - protein, 10 aa, Mus sp.
REKKKFLKRR

SEQ ID NO: 114 - protein, 20 aa, Homo sapiens
KRKGDEVDGVDEVAKKKSKK

SEQ ID NO: 115 - protein, 17 aa, Homo sapiens
RKCLQAGMNLEARKTKK

SEQ ID NO: 116 - protein, 11 aa, Artificial Sequence
  Synthetic Peptide
LYPERLRRILT

SEQ ID NO: 117 - protein, 33 aa, Artificial Sequence
  Synthetic Peptide
CTGTACCCTGAGCGGCTGCGGCGGATCCTGACC

SEQ ID NO: 118 - protein, 15 aa, Artificial Sequence
  Synthetic Peptide
  misc_feature (4)..(4): Xaa can be any naturally occurring amino acid
DKHXFGAFLNLARHN

SEQ ID NO: 119 - protein, 12 aa, Artificial Sequence
  Synthetic Peptide
GLLFFVSLFLDK

SEQ ID NO: 120 - protein, 7 aa, Artificial Sequence
  Synthetic Peptide
  misc_feature (4)..(4): Xaa can be any naturally occurring amino acid
SKIXGFK

SEQ ID NO: 121 - protein, 10 aa, Artificial Sequence
  Synthetic Peptide
  misc_feature (7)..(7): Xaa can be any naturally occurring amino acid
DMLNELXRCP

SEQ ID NO: 122 - protein, 15 aa, Artificial Sequence
  Synthetic Peptide
  misc_feature (2)..(2): Xaa can be any naturally occurring amino acid
  misc_feature (14)..(14): Xaa can be any naturally occurring amino acid
RXZDRFPYFALRYXD

SEQ ID NO: 123 - protein, 10 aa, Artificial Sequence
  Synthetic Oligonucleotide
  misc_feature (9)..(9): Xaa can be any naturally occurring amino acid
LRFQVBLGXY

SEQ ID NO: 124 - protein, 10 aa, Artificial Sequence
  Synthetic Peptide
GLLFFVSLFL

SEQ ID NO: 125 - protein, 9 aa, Artificial Sequence
  Synthetic Peptide
  misc_feature (4)..(4): Xaa can be any naturally occurring amino acid
RHQXRFPYF

SEQ ID NO: 126 - protein, 8 aa, Artificial Sequence
  Synthetic Peptide
RHQDRFPY

SEQ ID NO: 127 - protein, 4 aa, Artificial Sequence
  Synthetic Peptide
GGGS

SEQ ID NO: 128 - protein, 15 aa, Artificial Sequence
  Synthetic Peptide
GGGGSGGGGSGGGGS

SEQ ID NO: 129 - protein, 30 aa, Artificial Sequence
  Synthetic Peptide
GGGGSGGGGSGGGGSGGGGSGGGGSGGGGS

SEQ ID NO: 130 - protein, 45 aa, Artificial Sequence
  Synthetic Peptide
GGGGSGGGGSGGGGSGGGGSGGGGSGGGGSGGGGSGGGGSGGGGS

SEQ ID NO: 131 - protein, 60 aa, Artificial Sequence
  Synthetic Peptide
GGGGSGGGGSGGGGSGGGGSGGGGSGGGGSGGGGSGGGGSGGGGSGGGGSGGGGSGGGGS

SEQ ID NO: 132 - protein, 12 aa, Artificial Sequence
  Synthetic Peptide
FWYHKMILVAGC

SEQ ID NO: 133 - protein, 12 aa, Artificial Sequence
  Synthetic Peptide
WYHKREDCSTNQ

SEQ ID NO: 134 - protein, 9 aa, Artificial Sequence
  Synthetic Peptide
VCAGSPTND

SEQ ID NO: 135 - RNA, 25 nt, Artificial Sequence
  Synthetic Oligonucleotide
gggaacaaagcugaaguacuuaccc

SEQ ID NO: 136 - RNA, 12 nt, Artificial Sequence
  Synthetic Oligonucleotide
  misc_feature (1)..(1): 5 prime Biotin modification
  misc_feature (12)..(12): 3 prime Iowa Black modification
ucucguacguuc

SEQ ID NO: 137 - RNA, 24 nt, Artificial Sequence
  Synthetic Oligonucleotide
  misc_feature (1)..(1): 5 prime Biotin modification
  misc_feature (24)..(24): 3 prime Iowa Black modification
ucucguacguucucucguacguuc

SEQ ID NO: 138 - protein, 20 aa, Artificial Sequence
  Synthetic Peptide
GGGGSGGGGSGGGGSGGGGS

SEQ ID NO: 139 - protein, 25 aa, Artificial Sequence
  Synthetic Peptide
GGGGSGGGGSGGGGSGGGGSGGGGS

SEQ ID NO: 140 - protein, 35 aa, Artificial Sequence
  Synthetic Peptide
GGGGSGGGGSGGGGSGGGGSGGGGSGGGGSGGGGS

SEQ ID NO: 141 - protein, 40 aa, Artificial Sequence
  Synthetic Peptide
GGGGSGGGGSGGGGSGGGGSGGGGSGGGGSGGGGSGGGGS

SEQ ID NO: 142 - protein, 50 aa, Artificial Sequence
  Synthetic Peptide
GGGGSGGGGSGGGGSGGGGSGGGGSGGGGSGGGGSGGGGSGGGGSGGGGS

SEQ ID NO: 143 - protein, 55 aa, Artificial Sequence
  Synthetic Peptide
GGGGSGGGGSGGGGSGGGGSGGGGSGGGGSGGGGSGGGGSGGGGSGGGGSGGGGS

SEQ ID NO: 144 - protein, 15 aa, Artificial Sequence
  Synthetic Peptide
GSGGSGGSGGSGGSG

SEQ ID NO: 145 - protein, 32 aa, Artificial Sequence
  Synthetic Peptide
LEPGEKPYKCPECGKSFSQSGALTRHQRTHTR

SEQ ID NO: 146 - protein, 1224 aa, Bergeyella zoohelcum
MENKTSLGNNIYYNPFKPQDKSYFAGYFNAAMENTDSVFRELGKRLKGKEYTSENFFDAIFKENISLVEYERYVKLLSDYFPMARLLDKKEVPIKERKENFKKNFKGIIKAVRDLRNFYTHKEHGEVEITDEIFGVLDEMLKSTVLTVKKKKVKTDKTKEILKKSIEKQLDILCQKKLEYLRDTARKIEEKRRNQRERGEKELVAPFKYSDKRDDLIAAIYNDAFDVYIDKKKDSLKESSKAKYNTKSDPQQEEGDLKIPISKNGVVFLLSLFLTKQEIHAFKSKIAGFKATVIDEATVSEATVSHGKNSICFMATHEIFSHLAYKKLKRKVRTAEINYGEAENAEQLSVYAKETLMMQMLDELSKVPDVVYQNLSEDVQKTFIEDWNEYLKENNGDVGTMEEEQVIHPVIRKRYEDKFNYFAIRFLDEFAQFPTLRFQVHLGNYLHDSRPKENLISDRRIKEKITVFGRLSELEHKKALFIKNTETNEDREHYWEIFPNPNYDFPKENISVNDKDFPIAGSILDREKQPVAGKIGIKVKLLNQQYVSEVDKAVKAHQLKQRKASKPSIQNIIEEIVPINESNPKEAIVFGGQPTAYLSMNDIHSILYEFFDKWEKKKEKLEKKGEKELRKEIGKELEKKIVGKIQAQIQQIIDKDTNAKILKPYQDGNSTAIDKEKLIKDLKQEQNILQKLKDEQTVREKEYNDFIAYQDKNREINKVRDRNHKQYLKDNLKRKYPEAPARKEVLYYREKGKVAVWLANDIKRFMPTDFKNEWKGEQHSLLQKSLAYYEQCKEELKNLLPEKVFQHLPFKLGGYFQQKYLYQFYTCYLDKRLEYISGLVQQAENFKSENKVFKKVENECFKFLKKQNYTHKELDARVQSILGYPIFLERGFMDEKPTIIKGKTFKGNEALFADWFRYYKEYQNFQTFYDTENYPLVELEKKQADRKRKTKIYQQKKNDVFTLLMAKHIFKSVFKQDSIDQFSLEDLYQSREERLGNQERARQTGERNTNYIWNKTVDLKLCDGKITVENVKLKNVGDFIKYEYDQRVQAFLKYEENIEWQAFLIKESKEEENYPYVVEREIEQYEKVRREELLKEVHLIEEYILEKVKDKEILKKGDNQNFKYYILNGLLKQLKNEDVESYKVFNLNTEPEDVNINQLKQEATDLEQKAFVLTYIRNKFAHNQLPKKEFWDYCQEKYGKIEKEKTYAEYFAEVFKKEKEALIK

SEQ ID NO: 147 - protein, 1126 aa, Prevotella intermedia
MEDDKKTTDSIRYELKDKHFWAAFLNLARHNVYITVNHINKILEEGEINRDGYETTLKNTWNEIKDINKKDRLSKLIIKHFPFLEAATYRLNPTDTTKQKEEKQAEAQSLESLRKSFFVFIYKLRDLRNHYSHYKHSKSLERPKFEEGLLEKMYNIFNASIRLVKEDYQYNKDINPDEDFKHLDRTEEEFNYYFTKDNEGNITESGLLFFVSLFLEKKDAIWMQQKLRGFKDNRENKKKMTNEVFCRSRMLLPKLRLQSTQTQDWILLDMLNELIRCPKSLYERLREEDREKFRVPIEIADEDYDAEQEPFKNTLVRHQDRFPYFALRYFDYNEIFTNLRFQIDLGTYHFSIYKKQIGDYKESHHLTHKLYGFERIQEFTKQNRPDEWRKFVKTFNSFETSKEPYIPETTPHYHLENQKIGIRFRNDNDKIWPSLKTNSEKNEKSKYKLDKSFQAEAFLSVHELLPMMFYYLLLKTENTDNDNEIETKKKENKNDKQEKHKIEEIIENKITEIYALYDTFANGEIKSIDELEEYCKGKDIEIGHLPKQMIAILKDEHKVMATEAERKQEEMLVDVQKSLESLDNQINEEIENVERKNSSLKSGKIASWLVNDMMRFQPVQKDNEGKPLNNSKANSTEYQLLQRTLAFFGSEHERLAPYFKQTKLIESSNPHPFLKDTEWEKCNNILSFYRSYLEAKKNFLESLKPEDWEKNQYFLKLKEPKTKPKTLVQGWKNGFNLPRGIFTEPIRKWFMKHRENITVAELKRVGLVAKVIPLFFSEEYKDSVQPFYNYHFNVGNINKPDEKNFLNCEERRELLRKKKDEFKKMTDKEKEENPSYLEFKSWNKFERELRLVRNQDIVTWLLCMELFNKKKIKELNVEKIYLKNINTNTTKKEKNTEEKNGEEKNIKEKNNILNRIMPMRLPIKVYGRENFSKNKKKKIRRNTFFTVYIEEKGTKLLKQGNFKALERDRRLGGLFSFVKTPSKAESKSNTISKLRVEYELGEYQKARIEIIKDMLALEKTLIDKYNSLDTDNFNKMLTDWLELKGEPDKASFQNDVDLLIAVRNAFSHNQYPMRNRIAFANINPFSLSSANTSEEKGLGIANQLKDKTHKTIEKIIEIEKPIETKE

SEQ ID NO: 148 - protein, 1127 aa, Prevotella buccae
MQKQDKLFVDRKKNAIFAFPKYITIMENKEKPEPIYYELTDKHFWAAFLNLARHNVYTTINHINRRLEIAELKDDGYMMGIKGSWNEQAKKLDKKVRLRDLIMKHFPFLEAAAYEMTNSKSPNNKEQREKEQSEALSLNNLKNVLFIFLEKLQVLRNYYSHYKYSEESPKPIFETSLLKNMYKVFDANVRLVKRDYMHHENIDMQRDFTHLNRKKQVGRTKNIIDSPNFHYHFADKEGNMTIAGLLFFVSLFLDKKDAIWMQKKLKGFKDGRNLREQMTNEVFCRSRISLPKLKLENVQTKDWMQLDMLNELVRCPKSLYERLREKDRESFKVPFDIFSDDYNAEEEPFKNTLVRHQDRFPYFVLRYFDLNEIFEQLRFQIDLGTYHFSIYNKRIGDEDEVRHLTHHLYGFARIQDFAPQNQPEEWRKLVKDLDHFETSQEPYISKTAPHYHLENEKIGIKFCSAHNNLFPSLQTDKTCNGRSKFNLGTQFTAEAFLSVHELLPMMFYYLLLTKDYSRKESADKVEGIIRKEISNIYAIYDAFANNEINSIADLTRRLQNTNILQGHLPKQMISILKGRQKDMGKEAERKIGEMIDDTQRRLDLLCKQTNQKIRIGKRNAGLLKSGKIADWLVNDMMRFQPVQKDQNNIPINNSKANSTEYRMLQRALALFGSENFRLKAYFNQMNLVGNDNPHPFLAETQWEHQTNILSFYRNYLEARKKYLKGLKPQNWKQYQHFLILKVQKTNRNTLVTGWKNSFNLPRGIFTQPIREWFEKHNNSKRIYDQILSFDRVGFVAKAIPLYFAEEYKDNVQPFYDYPFNIGNRLKPKKRQFLDKKERVELWQKNKELFKNYPSEKKKTDLAYLDFLSWKKFERELRLIKNQDIVTWLMFKELFNMATVEGLKIGEIHLRDIDTNTANEESNNILNRIMPMKLPVKTYETDNKGNILKERPLATFYIEETETKVLKQGNFKALVKDRRLNGLFSFAETTDLNLEEHPISKLSVDLELIKYQTTRISIFEMTLGLEKKLIDKYSTLPTDSFRNMLERWLQCKANRPELKNYVNSLIAVRNAFSHNQYPMYDATLFAEVKKFTLFPSVDTKKIELNIAPQLLEIVGKAIKEIEKSENKN

SEQ ID NO: 149 - protein, 1135 aa, Porphyromonas gingivalis
MNTVPASENKGQSRTVEDDPQYFGLYLNLARENLIEVESHVRIKFGKKKLNEESLKQSLLCDHLLSVDRWTKVYGHSRRYLPFLHYFDPDSQIEKDHDSKTGVDPDSAQRLIRELYSLLDFLRNDFSHNRLDGTTFEHLEVSPDISSFITGTYSLACGRAQSRFAVFFKPDDFVLAKNRKEQLISVADGKECLTVSGFAFFICLFLDREQASGMLSRIRGFKRTDENWARAVHETFCDLCIRHPHDRLESSNTKEALLLDMLNELNRCPRILYDMLPEEERAQFLPALDENSMNNLSENSLDEESRLLWDGSSDWAEALTKRIRHQDRFPYLMLRFIEEMDLLKGIRFRVDLGEIELDSYSKKVGRNGEYDRTITDHALAFGKLSDFQNEEEVSRMISGEASYPVRFSLFAPRYAIYDNKIGYCHTSDPVYPKSKTGEKRALSNPQSMGFISVHDLRKLLLMELLCEGSFSRMQSDFLRKANRILDETAEGKLQFSALFPEMRHRFIPPQNPKSKDRREKAETTLEKYKQEIKGRKDKLNSQLLSAFDMDQRQLPSRLLDEWMNIRPASHSVKLRTYVKQLNEDCRLRLRKFRKDGDGKARAIPLVGEMATFLSQDIVRMIISEETKKLITSAYYNEMQRSLAQYAGEENRRQFRAIVAELRLLDPSSGHPFLSATMETAHRYTEGFYKCYLEKKREWLAKIFYRPEQDENTKRRISVFFVPDGEARKLLPLLIRRRMKEQNDLQDWIRNKQAHPIDLPSHLFDSKVMELLKVKDGKKKWNEAFKDWWSTKYPDGMQPFYGLRRELNIHGKSVSYIPSDGKKFADCYTHLMEKTVRDKKRELRTAGKPVPPDLAADIKRSFHRAVNEREFMLRLVQEDDRLMLMAINKMMTDREEDILPGLKNIDSILDEENQFSLAVHAKVLEKEGEGGDNSLSLVPATIEIKSKRKDWSKYIRYRYDRRVPGLMSHFPEHKATLDEVKTLLGEYDRCRIKIFDWAFALEGAIMSDRDLKPYLHESSSREGKSGEHSTLVKMLVEKKGCLTPDESQYLILIRNKAAHNQFPCAAEMPLIYRDVSAKVGSIEGSSAKDLPEGSSLVDSLWKKYEMIIRKILPILDPENRFFGKLLNNMSQPINDL

SEQ ID NO: 150 - protein, 1115 aa, Bacteroides pyogenes
MESIKNSQKSTGKTLQKDPPYFGLYLNMALLNVRKVENHIRKWLGDVALLPEKSGFHSLLTTDNLSSAKWTRFYYKSRKFLPFLEMFDSDKKSYENRRETAECLDTIDRQKISSLLKEVYGKLQDIRNAFSHYHIDDQSVKHTALIISSEMHRFIENAYSFALQKTRARFTGVFVETDFLQAEEKGDNKKFFAIGGNEGIKLKDNALIFLICLFLDREEAFKFLSRATGFKSTKEKGFLAVRETFCALCCRQPHERLLSVNPREALLMDMLNELNRCPDILFEMLDEKDQKSFLPLLGEEEQAHILENSLNDELCEAIDDPFEMIASLSKRVRYKNRFPYLMLRYIEEKNLLPFIRFRIDLGCLELASYPKKMGEENNYERSVTDHAMAFGRLTDFHNEDAVLQQITKGITDEVRFSLYAPRYAIYNNKIGFVRTSGSDKISFPTLKKKGGEGHCVAYTLQNTKSFGFISIYDLRKILLLSFLDKDKAKNIVSGLLEQCEKHWKDLSENLFDAIRTELQKEFPVPLIRYTLPRSKGGKLVSSKLADKQEKYESEFERRKEKLTEILSEKDFDLSQIPRRMIDEWLNVLPTSREKKLKGYVETLKLDCRERLRVFEKREKGEHPLPPRIGEMATDLAKDIIRMVIDQGVKQRITSAYYSEIQRCLAQYAGDDNRRHLDSIIRELRLKDTKNGHPFLGKVLRPGLGHTEKLYQRYFEEKKEWLEATFYPAASPKRVPRFVNPPTGKQKELPLIIRNLMKERPEWRDWKQRKNSHPIDLPSQLFENEICRLLKDKIGKEPSGKLKWNEMFKLYWDKEFPNGMQRFYRCKRRVEVFDKVVEYEYSEEGGNYKKYYEALIDEVVRQKISSSKEKSKLQVEDLTLSVRRVFKRAINEKEYQLRLLCEDDRLLFMAVRDLYDWKEAQLDLDKIDNMLGEPVSVSQVIQLEGGQPDAVIKAECKLKDVSKLMRYCYDGRVKGLMPYFANHEATQEQVEMELRHYEDHRRRVFNWVFALEKSVLKNEKLRRFYEESQGGCEHRRCIDALRKASLVSEEEYEFLVHIRNKSAHNQFPDLEIGKLPPNVTSGFCECIWSKYKAIICRIIPFIDPERRFFGKLLEQK

SEQ ID NO: 151 - protein, 953 aa, Alistipes species
MSNEIGAFREHQFAYAPGNEKQEEATFATYFNLALSNVEGMMFGEVESNPDKIEKSLDTLPPAILRQIASFIWLSKEDHPDKAYSTEEVKVIVTDLVRRLCFYRNYFSHCFYLDTQYFYSDELVDTTAIGEKLPYNFHHFITNRLFRYSLPEITLFRWNEGERKYEILRDGLIFFCCLFLKRGQAERFLNELRFFKRTDEEGRIKRTIFTKYCTRESHKHIGIEEQDFLIFQDIIGDLNRVPKVCDGVVDLSKENERYIKNRETSNESDENKARYRLLIREKDKFPYYLMRYIVDFGVLPCITFKQNDYSTKEGRGQFHYQDAAVAQEERCYNFVVRNGNVYYSYMPQAQNVVRISELQGTISVEELRNMVYASINGKDVNKSVEQYLYHLHLLYEKILTISGQTIKEGRVDVEDYRPLLDKLLLRPASNGEELRRELRKLLPKRVCDLLSNRFDCSEGVSAVEKRLKAILLRHEQLLLSQNPALHIDKIKSVIDYLYLFFSDDEKFRQQPTEKAHRGLKDEEFQMYHYLVGDYDSHPLALWKELEASGRLKPEMRKLTSATSLHGLYMLCLKGTVEWCRKQLMSIGKGTAKVEAIADRVGLKLYDKLKEYTPEQLEREVKLVVMHGYAAAATPKPKAQAAIPSKLTELRFYSFLGKREMSFAAFIRQDKKAQKLWLRNFYTVENIKTLQKRQAAADAACKKLYNLVGEVERVHTNDKVLVLVAQRYRERLLNVGSKCAVTLDNPERQQKLADVYEVQNAWLSIRFDDLDFTLTHVNLSNLRKAYNLIPRKHILAFKEYLDNRVKQKLCEECRNVRRKEDLCTCCSPRYSNLTSWLKENHSESSIEREAATMMLLDVERKLLSFLLDERRKAIIEYGKFIPFSALVKECRLADAGLCGIRNDVLHDNVISYADAIGKLSAYFPKEASEAVEYIRRTKEVREQRREELMANSSQ

SEQ ID NO: 152 - protein, 1322 aa, Prevotella species
MSKECKKQRQEKKRRLQKANFSISLTGKHVFGAYFNMARTNFVKTINYILPIAGVRGNYSENQINKMLHALFLIQAGRNEELTTEQKQWEKKLRLNPEQQTKFQKLLFKHFPVLGPMMADVADHKAYLNKKKSTVQTEDETFAMLKGVSLADCLDIICLMADTLTECRNFYTHKDPYNKPSQLADQYLHQEMIAKKLDKVVVASRRILKDREGLSVNEVEFLTGIDHLHQEVLKDEFGNAKVKDGKVMKTFVEYDDFYFKISGKRLVNGYTVTTKDDKPVNVNTMLPALSDFGLLYFCVLFLSKPYAKLFIDEVRLFEYSPFDDKENMIMSEMLSIYRIRTPRLHKIDSHDSKATLAMDIFGELRRCPMELYNLLDKNAGQPFFHDEVKHPNSHTPDVSKRLRYDDRFPTLALRYIDETELFKRIRFQLQLGSFRYKFYDKENCIDGRVRVRRIQKEINGYGRMQEVADKRMDKWGDLIQKREERSVKLEHEELYINLDQFLEDTADSTPYVTDRRPAYNIHANRIGLYWEDSQNPKQYKVFDENGMYIPELVVTEDKKAPIKMPAPRCALSVYDLPAMLFYEYLREQQDNEFPSAEQVIIEYEDDYRKFFKAVAEGKLKPFKRPKEFRDFLKKEYPKLRMADIPKKLQLFLCSHGLCYNNKPETVYERLDRLTLQHLEERELHIQNRLEHYQKDRDMIGNKDNQYGKKSFSDVRHGALARYLAQSMMEWQPTKLKDKEKGHDKLTGLNYNVLTAYLATYGHPQVPEEGFTPRTLEQVLINAHLIGGSNPHPFINKVLALGNRNIEELYLHYLEEELKHIRSRIQSLSSNPSDKALSALPFIHHDRMRYHERTSEEMMALAARYTTIQLPDGLFTPYILEILQKHYTENSDLQNALSQDVPVKLNPTCNAAYLITLFYQTVLKDNAQPFYLSDKTYTRNKDGEKAESFSFKRAYELFSVLNNNKKDTFPFEMIPLFLTSDEIQERLSAKLLDGDGNPVPEVGEKGKPATDSQGNTIWKRRIYSEVDDYAEKLTDRDMKISFKGEWEKLPRWKQDKIIKRRDETRRQMRDELLQRMPRYIRDIKDNERTLRRYKTQDMVLFLLAEKMFTNIISEQSSEFNWKQMRLSKVCNEAFLRQTLTFRVPVTVGETTIYVEQENMSLKNYGEFYRFLTDDRLMSLLNNIVETLKPNENGDLVIRHTDLMSELAAYDQYRSTIFMLIQSIENLIITNNAVLDDPDADGFWVREDLPKRNNFASLLELINQLNNVELTDDERKLLVAIRNAFSHNSYNIDFSLIKDVKHLPEVAKGILQHLQSMLGVEITK

SEQ ID NO: 153 - protein, 1095 aa, Riemerella anatipestifer
MEKPLLPNVYTLKHKFFWGAFLNIARHNAFITICHINEQLGLKTPSNDDKIVDVVCETWNNILNNDHDLLKKSQLTELILKHFPFLTAMCYHPPKKEGKKKGHQKEQQKEKESEAQSQAEALNPSKLIEALEILVNQLHSLRNYYSHYKHKKPDAEKDIFKHLYKAFDASLRMVKEDYKAHFTVNLTRDFAHLNRKGKNKQDNPDFNRYRFEKDGFFTESGLLFFTNLFLDKRDAYWMLKKVSGFKASHKQREKMTTEVFCRSRILLPKLRLESRYDHNQMLLDMLSELSRCPKLLYEKLSEENKKHFQVEADGFLDEIEEEQNPFKDTLIRHQDRFPYFALRYLDLNESFKSIRFQVDLGTYHYCIYDKKIGDEQEKRHLTRTLLSFGRLQDFTEINRPQEWKALTKDLDYKETSNQPFISKTTPHYHITDNKIGFRLGTSKELYPSLEIKDGANRIAKYPYNSGFVAHAFISVHELLPLMFYQHLTGKSEDLLKETVRHIQRIYKDFEEERINTIEDLEKANQGRLPLGAFPKQMLGLLQNKQPDLSEKAKIKIEKLIAETKLLSHRLNTKLKSSPKLGKRREKLIKTGVLADWLVKDFMRFQPVAYDAQNQPIKSSKANSTEFWFIRRALALYGGEKNRLEGYFKQTNLIGNTNPHPFLNKFNWKACRNLVDFYQQYLEQREKFLEAIKNQPWEPYQYCLLLKIPKENRKNLVKGWEQGGISLPRGLFTEAIRETLSEDLMLSKPIRKEIKKHGRVGFISRAITLYFKEKYQDKHQSFYNLSYKLEAKAPLLKREEHYEYWQQNKPQSPTESQRLELHTSDRWKDYLLYKRWQHLEKKLRLYRNQDVMLWLMTLELTKNHFKELNLNYHQLKLENLAVNVQEADAKLNPLNQTLPMVLPVKVYPATAFGEVQYHKTPIRTVYIREEHTKALKMGNFKALVKDRRLNGLFSFIKEENDTQKHPISQLRLRRELEIYQSLRVDAFKETLSLEEKLLNKHTSLSSLENEFRALLEEWKKEYAASSMVTDEHIAFIASVRNAFCHNQYPFYKEALHAPIPLFTVAQPTTEEKDGLGIAEALLKVLREYCEIVKSQI

SEQ ID NO: 154 - protein, 1124 aa, Prevotella aurantiaca
MEDDKKTTGSISYELKDKHFWAAFLNLARHNVYITINHINKLLEIREIDNDEKVLDIKTLWQKGNKDLNQKARLRELMTKHFPFLETAIYTKNKEDKKEVKQEKQAEAQSLESLKDCLFLFLDKLQEARNYYSHYKYSEFSKEPEFEEGLLEKMYNIFGNNIQLVINDYQHNKDINPDEDFKHLDRKGQFKYSFADNEGNITESGLLFFVSLFLEKKDAIWMQQKLNGFKDNLENKKKMTHEVFCRSRILMPKLRLESTQTQDWILLDMLNELIRCPKSLYERLQGDDREKFKVPFDPADEDYNAEQEPFKNTLIRHQDRFPYFVLRYFDYNEIFKNLRFQIDLGTYHFSIYKKLIGGQKEDRHLTHKLYGFERIQEFAKQNRPDEWKAIVKDLDTYETSNKRYISETTPHYHLENQKIGIRFRNGNKEIWPSLKTNDENNEKSKYKLDKQYQAEAFLSVHELLPMMFYYLLLKKEKPNNDEINASIVEGFIKREIRNIFKLYDAFANGEINNIDDLEKYCADKGIPKRHLPKQMVAILYDEHKDMVKEAKRKQKEMVKDTKKLLATLEKQTQKEKEDDGRNVKLLKSGEIARWLVNDMMRFQPVQKDNEGKPLNNSKANSTEYQMLQRSLALYNNEEKPTRYFRQVNLIESNNPHPFLKWTKWEECNNILTFYYSYLTKKIEFLNKLKPEDWKKNQYFLKLKEPKTNRETLVQGWKNGFNLPRGIFTEPIREWFKRHQNNSKEYEKVEALDRVGLVTKVIPLFFKEEYFKDKEENFKEDTQKEINDCVQPFYNFPYNVGNIHKPKEKDFLHREERIELWDKKKDKFKGYKEKIKSKKLTEKDKEEFRSYLEFQSWNKFERELRLVRNQDIVTWLLCKELIDKLKIDELNIEELKKLRLNNIDTDTAKKEKNNILNRVMPMELPVTVYEIDDSHKIVKDKPLHTIYIKEAETKLLKQGNFKALVKDRRLNGLFSFVKTNSEAESKRNPISKLRVEYELGEYQEARIEIIQDMLALEEKLINKYKDLPTNKFSEMLNSWLEGKDEADKARFQNDVDFLIAVRNAFSHNQYPMHNKIEFANIKPFSLYTANNSEEKGLGIANQLKDKTKETTDKIKKIEKPIETKE

SEQ ID NO: 155 - protein, 1151 aa, Prevotella saccharolytica
MEDKPFWAAFFNLARHNVYLTVNHINKLLDLEKLYDEGKHKEIFEREDIFNISDDVMNDANSNGKKRKLDIKKIWDDLDTDLTRKYQLRELILKHFPFIQPAIIGAQTKERTTIDKDKRSTSTSNDSLKQTGEGDINDLLSLSNVKSMFFRLLQILEQLRNYYSHVKHSKSATMPNFDEDLLNWMRYIFIDSVNKVKEDYSSNSVIDPNTSFSHLIYKDEQGKIKPCRYPFTSKDGSINAFGLLFFVSLFLEKQDSIWMQKKIPGFKKASENYMKMTNEVFCRNHILLPKIRLETVYDKDWMLLDMLNEVVRCPLSLYKRLTPAAQNKFKVPEKSSDNANRQEDDNPFSRILVRHQNRFPYFVLRFFDLNEVFTTLRFQINLGCYHFAICKKQIGDKKEVHHLIRTLYGFSRLQNFTQNTRPEEWNTLVKTTEPSSGNDGKTVQGVPLPYISYTIPHYQIENEKIGIKIFDGDTAVDTDIWPSVSTEKQLNKPDKYTLTPGFKADVFLSVHELLPMMFYYQLLLCEGMLKTDAGNAVEKVLIDTRNAIFNLYDAFVQEKINTITDLENYLQDKPILIGHLPKQMIDLLKGHQRDMLKAVEQKKAMLIKDTERRLKLLDKQLKQETDVAAKNTGTLLKNGQIADWLVNDMMRFQPVKRDKEGNPINCSKANSTEYQMLQRAFAFYATDSCRLSRYFTQLHLIHSDNSHLFLSRFEYDKQPNLIAFYAAYLKAKLEFLNELQPQNWASDNYFLLLRAPKNDRQKLAEGWKNGFNLPRGLFTEKIKTWFNEHKTIVDISDCDIFKNRVGQVARLIPVFFDKKFKDHSQPFYRYDFNVGNVSKPTEANYLSKGKREELFKSYQNKFKNNIPAEKTKEYREYKNFSLWKKFERELRLIKNQDILIWLMCKNLFDEKIKPKKDILEPRIAVSYIKLDSLQTNTSTAGSLNALAKVVPMTLAIHIDSPKPKGKAGNNEKENKEFTVYIKEEGTKLLKWGNFKTLLADRRIKGLFSYIEHDDIDLKQHPLTKRRVDLELDLYQTCRIDIFQQTLGLEAQLLDKYSDLNTDNFYQMLIGWRKKEGIPRNIKEDTDFLKDVRNAFSHNQYPDSKKIAFRRIRKFNPKELILEEEEGLGIATQMYKEVEKVVNRIKRIELFD

SEQ ID NO: 156 - protein, 1159 aa, Myroides odoratimimus
MKDILTTDTTEKQNRFYSHKIADKYFFGGYFNLASNNIYEVFEEVNKRNTFGKLAKRDNGNLKNYIIHVFKDELSISDFEKRVAIFASYFPILETVDKKSIKERNRTIDLTLSQRIRQFREMLISLVTAVDQLRNFYTHYHHSDIVIENKVLDFLNSSFVSTALHVKDKYLKTDKTKEFLKETIAAELDILIEAYKKKQIEKKNTRFKANKREDILNAIYNEAFWSFINDKDKDKDKETVVAKGADAYFEKNHHKSNDPDFALNISEKGIVYLLSFFLTNKEMDSLKANLTGFKGKVDRESGNSIKYMATQRIYSFHTYRGLKQKIRTSEEGVKETLLMQMIDELSKVPNVVYQHLSTTQQNSFIEDWNEYYKDYEDDVETDDLSRVIHPVIRKRYEDRFNYFAIRFLDEFFDFPTLRFQVHLGDYVHDRRTKQLGKVESDRIIKEKVTVFARLKDINSAKASYFHSLEEQDKEELDNKWTLFPNPSYDFPKEHTLQHQGEQKNAGKIGIYVKLRDTQYKEKAALEEARKSLNPKERSATKASKYDIITQIIEANDNVKSEKPLVFTGQPIAYLSMNDIHSMLFSLLTDNAELKKTPEEVEAKLIDQIGKQINEILSKDTDTKILKKYKDNDLKETDTDKITRDLARDKEEIEKLILEQKQRADDYNYTSSTKFNIDKSRKRKHLLFNAEKGKIGVWLANDIKRFMFKESKSKWKGYQHTELQKLFAYFDTSKSDLELILSNMVMVKDYPIELIDLVKKSRTLVDFLNKYLEARLEYIENVITRVKNSIGTPQFKTVRKECFTFLKKSNYTVVSLDKQVERILSMPLFIERGFMDDKPTMLEGKSYKQHKEKFADWFVHYKENSNYQNFYDTEVYEITTEDKREKAKVTKKIKQQQKNDVFTLMMVNYMLEEVLKLSSNDRLSLNELYQTKEERIVNKQVAKDTQERNKNYIWNKVVDLQLCDGLVHIDNVKLKDIGNFRKYENDSRVKEFLTYQSDIVWSAYLSNEVDSNKLYVIERQLDNYESIRSKELLKEVQEIECSVYNQVANKESLKQSGNENFKQYVLQGLLPIGMDVREMLILSTDVKFKKEEIIQLGQAGEVEQDLYSLIYIRNKFAHNQLPIKEFFDFCENNYRSISDNEYYAEYYMEIFRSIKEKYAN

SEQ ID NO: 157 - protein, 1120 aa, Prevotella intermedia
MEDDKKTTDSIRYELKDKHFWAAFLNLARHNVYITVNHINKILEEDEINRDGYENTLENSWNEIKDINKKDRLSKLIIKHFPFLEATTYRQNPTDTTKQKEEKQAEAQSLESLKKSFFVFIYKLRDLRNHYSHYKHSKSLERPKFEEDLQNKMYNIFDVSIQFVKEDYKHNTDINPKKDFKHLDRKRKGKFHYSFADNEGNITESGLLFFVSLFLEKKDAIWVQKKLEGFKCSNKSYQKMTNEVFCRSRMLLPKLRLESTQTQDWILLDMLNELIRCPKSLYERLQGVNRKKFYVSFDPADEDYDAEQEPFKNTLVRHQDRFPYFALRYFDYNEVFANLRFQIDLGTYHFSIYKKLIGGQKEDRHLTHKLYGFERIQEFDKQNRPDEWKAIVKDSDTFKKKEEKEEEKPYISETTPHYHLENKKIGIAFKNHNIWPSTQTELTNNKRKKYNLGTSIKAEAFLSVHELLPMMFYYLLLKTENTKNDNKVGGKKETKKQGKHKIEAIIESKIKDIYALYDAFANGEINSEDELKEYLKGKDIKIVHLPKQMIAILKNEHKDMAEKAEAKQEKMKLATENRLKTLDKQLKGKIQNGKRYNSAPKSGEIASWLVNDMMRFQPVQKDENGESLNNSKANSTEYQLLQRTLAFFGSEHERLAPYFKQTKLIESSNPHPFLNDTEWEKCSNILSFYRSYLKARKNFLESLKPEDWEKNQYFLMLKEPKTNRETLVQGWKNGFNLPRGFFTEPIRKWFMEHWKSIKVDDLKRVGLVAKVTPLFFSEKYKDSVQPFYNYPFNVGDVNKPKEEDFLHREERIELWDKKKDKFKGYKAKKKFKEMTDKEKEEHRSYLEFQSWNKFERELRLVRNQDIVTWLLCTELIDKLKIDELNIKELKKLRLKDINTDTAKKEKNNILNRVMPMELPVTVYKVNKGGYIIKNKPLHTIYIKEAETKLLKQGNFKALVKDRRLNGLFSFVKTPSEAESESNPISKLRVEYELGKYQNARLDIIEDMLALEKKLIDKYNSLDTDNFHNMLTGWLELKGEAKKARFQNDVKLLTAVRNAFSHNQYPMYDENLFGNIERFSLSSSNIIESKGLDIAAKLKEEVSKAAKKIQNEEDNKKEKET

SEQ ID NO: 158 - protein, 1199 aa, Capnocytophaga canimorsus
MKNIQRLGKGNEFSPFKKEDKFYFGGFLNLANNNIEDFFKEIITRFGIVITDENKKPKETFGEKILNEIFKKDISIVDYEKWVNIFADYFPFTKYLSLYLEEMQFKNRVICFRDVMKELLKTVEALRNFYTHYDHEPIKIEDRVFYFLDKVLLDVSLTVKNKYLKTDKTKEFLNQHIGEELKELCKQRKDYLVGKGKRIDKESEIINGIYNNAFKDFICKREKQDDKENHNSVEKILCNKEPQNKKQKSSATVWELCSKSSSKYTEKSFPNRENDKHCLEVPISQKGIVFLLSFFLNKGEIYALTSNIKGFKAKITKEEPVTYDKNSIRYMATHRMFSFLAYKGLKRKIRTSEINYNEDGQASSTYEKETLMLQMLDELNKVPDVVYQNLSEDVQKTFIEDWNEYLKENNGDVGTMEEEQVIHPVIRKRYEDKFNYFAIRFLDEFAQFPTLRFQVHLGNYLCDKRTKQICDTTTEREVKKKITVFGRLSELENKKAIFLNEREEIKGWEVFPNPSYDFPKENISVNYKDFPIVGSILDREKQPVSNKIGIRVKIADELQREIDKAIKEKKLRNPKNRKANQDEKQKERLVNEIVSTNSNEQGEPVVFIGQPTAYLSMNDIHSVLYEFLINKISGEALETKIVEKIETQIKQIIGKDATTKILKPYTNANSNSINREKLLRDLEQEQQILKTLLEEQQQREKDKKDKKSKRKHELYPSEKGKVAVWLANDIKRFMPKAFKEQWRGYHHSLLQKYLAYYEQSKEELKNLLPKEVFKHFPFKLKGYFQQQYLNQFYTDYLKRRLSYVNELLLNIQNFKNDKDALKATEKECFKFFRKQNYIINPINIQIQSILVYPIFLKRGFLDEKPTMIDREKFKENKDTELADWFMHYKNYKEDNYQKFYAYPLEKVEEKEKFKRNKQINKQKKNDVYTLMMVEYIIQKIFGDKFVEENPLVLKGIFQSKAERQQNNTHAATTQERNLNGILNQPKDIKIQGKITVKGVKLKDIGNFRKYEIDQRVNTFLDYEPRKEWMAYLPNDWKEKEKQGQLPPNNVIDRQISKYETVRSKILLKDVQELEKIISDEIKEEHRHDLKQGKYYNFKYYILNGLLRQLKNENVENYKVFKLNTNPEKVNITQLKQEATDLEQKAFVLTYIRNKFAHNQLPKKEFWDYCQEKYGKIEKEKTYAEYFAEVFKREKEALIK

SEQ ID NO: 159 - protein, 1175 aa, Porphyromonas gulae
MTEQSERPYNGTYYTLEDKHFWAAFLNLARHNAYITLTHIDRQLAYSKADITNDQDVLSFKALWKNFDNDLERKSRLRSLILKHFSFLEGAAYGKKLFESKSSGNKSSKNKELTKKEKEELQANALSLDNLKSILFDFLQKLKDFRNYYSHYRHSGSSELPLFDGNMLQRLYNVFDVSVQRVKIDHEHNDEVDPHYHFNHLVRKGKKDRYGHNDNPSFKHHFVDGEGMVTEAGLLFFVSLFLEKRDAIWMQKKIRGFKGGTETYQQMTNEVFCRSRISLPKLKLESLRMDDWMLLDMLNELVRCPKPLYDRLREDDRACFRVPVDILPDEDDTDGGGEDPFKNTLVRHQDRFPYFALRYFDLKKVFTSLRFHIDLGTYHFAIYKKMIGEQPEDRHLTRNLYGFGRIQDFAEEHRPEEWKRLVRDLDYFETGDKPYISQTSPHYHIEKGKIGLRFMPEGQHLWPSPEVGTTRTGRSKYAQDKRLTAEAFLSVHELMPMMFYYFLLREKYSEEVSAERVQGRIKRVIEDVYAVYDAFARDEINTRDELDACLADKGIRRGHLPRQMIAILSQEHKDMEEKIRKKLQEMMADTDHRLDMLDRQTDRKIRIGRKNAGLPKSGVIADWLVRDMMRFQPVAKDASGKPLNNSKANSTEYRMLQRALALFGGEKERLTPYFRQMNLTGGNNPHPFLHETRWESHTNILSFYRSYLRARKAFLERIGRSDRVENRPFLLLKEPKTDRQTLVAGWKGEFHLPRGIFTEAVRDCLIEMGHDEVASYKEVGFMAKAVPLYFERACEDRVQPFYDSPFNVGNSLKPKKGRFLSKEERAEEWERGKERFRDLEAWSYSAARRIEDAFAGIEYASPGNKKKIEQLLRDLSLWEAFESKLKVRADRINLAKLKKEILEAQEHPYHDFKSWQKFERELRLVKNQDIITWMMCRDLMEENKVEGLDTGTLYLKDIRPNVQEQGSLNVLNRVKPMRLPVVVYRADSRGHVHKEEAPLATVYIEERDTKLLKQGNFKSFVKDRRLNGLFSFVDTGGLAMEQYPISKLRVEYELAKYQTARVCVFELTLRLEESLLTRYPHLPDESFREMLESWSDPLLAKWPELHGKVRLLIAVRNAFSHNQYPMYDEAVFSSIRKYDPSSPDAIEERMGLNIAHRLSEEVKQAKETVERIIQA

SEQ ID NO: 160 - protein, 1090 aa, Prevotella species
MNIPALVENQKKYFGTYSVMAMLNAQTVLDHIQKVADIEGEQNENNENLWFHPVMSHLYNAKNGYDKQPEKTMFIIERLQSYFPFLKIMAENQREYSNGKYKQNRVEVNSNDIFEVLKRAFGVLKMYRDLTNHYKTYEEKLNDGCEFLTSTEQPLSGMINNYYTVALRNMNERYGYKTEDLAFIQDKRFKFVKDAYGKKKSQVNTGFFLSLQDYNGDTQKKLHLSGVGIALLICLFLDKQYINIFLSRLPIFSSYNAQSEERRIIIRSFGINSIKLPKDRIHSEKSNKSVAMDMLNEVKRCPDELFTTLSAEKQSRFRIISDDHNEVLMKRSSDRFVPLLLQYIDYGKLFDHIRFHVNMGKLRYLLKADKTCIDGQTRVRVIEQPLNGFGRLEEAETMRKQENGTFGNSGIRIRDFENMKRDDANPANYPYIVDTYTHYILENNKVEMFINDKEDSAPLLPVIEDDRYVVKTIPSCRMSTLEIPAMAFHMFLFGSKKTEKLIVDVHNRYKRLFQAMQKEEVTAENIASFGIAESDLPQKILDLISGNAHGKDVDAFIRLTVDDMLTDTERRIKRFKDDRKSIRSADNKMGKRGFKQISTGKLADFLAKDIVLFQPSVNDGENKITGLNYRIMQSAIAVYDSGDDYEAKQQFKLMFEKARLIGKGTTEPHPFLYKVFARSIPANAVEFYERYLIERKFYLTGLSNEIKKGNRVDVPFIRRDQNKWKTPAMKTLGRIYSEDLPVELPRQMFDNEIKSHLKSLPQMEGIDFNNANVTYLIAEYMKRVLDDDFQTFYQWNRNYRYMDMLKGEYDRKGSLQHCFTSVEEREGLWKERASRTERYRKQASNKIRSNRQMRNASSEEIETILDKRLSNSRNEYQKSEKVIRRYRVQDALLFLLAKKTLTELADFDGERFKLKEIMPDAEKGILSEIMPMSFTFEKGGKKYTITSEGMKLKNYGDFFVLASDKRIGNLLELVGSDIVSKEDIMEEFNKYDQCRPEISSIVFNLEKWAFDTYPELSARVDREEKVDFKSILKILLNNKNINKEQSDILRKIRNAFDHNNYPDKGVVEIKALPEIAMSIKKAFGEYAIMK

SEQ ID NO: 161 - protein, 1150 aa, Flavobacterium branchiophilum
MENLNKILDKENEICISKIFNTKGIAAPITEKALDNIKSKQKNDLNKEARLHYFSIGHSFKQIDTKKVFDYVLIEELKDEKPLKFITLQKDFFTKEFSIKLQKLINSIRNINNHYVHNFNDINLNKIDSNVFHFLKESFELAIIEKYYKVNKKYPLDNEIVLFLKELFIKDENTALLNYFTNLSKDEAIEYILTFTITENKIWNINNEHNILNIEKGKYLTFEAMLFLITIFLYKNEANHLLPKLYDFKNNKSKQELFTFFSKKFTSQDIDAEEGHLIKFRDMIQYLNHYPTAWNNDLKLESENKNKIMTTKLIDSIIEFELNSNYPSFATDIQFKKEAKAFLFASNKKRNQTSFSNKSYNEEIRHNPHIKQYRDEIASALTPISFNVKEDKFKIFVKKHVLEEYFPNSIGYEKFLEYNDFTEKEKEDFGLKLYSNPKTNKLIERIDNHKLVKSHGRNQDRFMDFSMRFLAENNYFGKDAFFKCYKFYDTQEQDEFLQSNENNDDVKFHKGKVTTYIKYEEHLKNYSYWDCPFVEENNSMSVKISIGSEEKILKIQRNLMIYFLENALYNENVENQGYKLVNNYYRELKKDVEESIASLDLIKSNPDFKSKYKKILPKRLLHNYAPAKQDKAPENAFETLLKKADFREEQYKKLLKKAEHEKNKEDFVKRNKGKQFKLHFIRKACQMMYFKEKYNTLKEGNAAFEKKDPVIEKRKNKEHEFGHHKNLNITREEFNDYCKWMFAFNGNDSYKKYLRDLFSEKHFFDNQEYKNLFESSVNLEAFYAKTKELFKKWIETNKPTNNENRYTLENYKNLILQKQVFINVYHFSKYLIDKNLLNSENNVIQYKSLENVEYLISDFYFQSKLSIDQYKTCGKLFNKLKSNKLEDCLLYEIAYNYIDKKNVHKIDIQKILTSKIILTINDANTPYKISVPFNKLERYTEMIAIKNQNNLKARFLIDLPLYLSKNKIKKGKDSAGYEIIIKNDLEIEDINTINNKIINDSVKFTEVLMELEKYFILKDKCILSKNYIDNSEIPSLKQFSKVWIKENENEIINYRNIACHFHLPLLETFDNLLLNVEQKFIKEELQNVSTINDLSKPQEYLILLFIKFKHNNFYLNLFNKNESKTIKNDKEVKKNRVLQKFINQVILKKK

SEQ ID NO: 162 - protein, 1159 aa, Myroides odoratimimus
MKDILTTDTTEKQNRFYSHKIADKYFFGGYFNLASNNIYEVFEEVNKRNTFGKLAKRDNGNLKNYIIHVFKDELSISDFEKRVAIFASYFPILETVDKKSIKERNRTIDLTLSQRIRQFREMLISLVTAVDQLRNFYTHYHHSDIVIENKVLDFLNSSFVSTALHVKDKYLKTDKTKEFLKETIAAELDILIEAYKKKQIEKKNTRFKANKREDILNAIYNEAFWSFINDKDKDKDKETVVAKGADAYFEKNHHKSNDPDFALNISEKGIVYLLSFFLTNKEMDSLKANLTGFKGKVDRESGNSIKYMATQRIYSFHTYRGLKQKIRTSEEGVKETLLMQMIDELSKVPNVVYQHLSTTQQNSFIEDWNEYYKDYEDDVETDDLSRVTHPVIRKRYEDRFNYFAIRFLDEFFDFPTLRFQVHLGDYVHDRRTKQLGKVESDRIIKEKVTVFARLKDINSAKASYFHSLEEQDKEELDNKWTLFPNPSYDFPKEHTLQHQGEQKNAGKIGIYVKLRDTQYKEKAALEEARKSLNPKERSATKASKYDIITQIIEANDNVKSEKPLVFTGQPIAYLSMNDIHSMLFSLLTDNAELKKTPEEVEAKLIDQIGKQINEILSKDTDTKILKKYKDNDLKETDTDKITRDLARDKEEIEKLILEQKQRADDYNYTSSTKFNIDKSRKRKHLLFNAEKGKIGVWLANDIKRFMFKESKSKWKGYQHIELQKLFAYFDTSKSDLELILSNMVMVKDYPIELIDLVKKSRTLVDFLNKYLEARLEYIENVITRVKNSIGTPQFKTVRKECFTFLKKSNYTVVSLDKQVERILSMPLFIERGFMDDKPTMLEGKSYKQHKEKFADWFVHYKENSNYQNFYDTEVYEITTEDKREKAKVTKKIKQQQKNDVFTLMMVNYMLEEVLKLSSNDRLSLNELYQTKEERIVNKQVAKDTQERNKNYIWNKVVDLQLCDGLVHIDNVKLKDIGNFRKYENDSRVKEFLTYQSDIVWSAYLSNEVDSNKLYVIERQLDNYESIRSKELLKEVQEIECSVYNQVANKESLKQSGNENFKQYVLQGLLPIGMDVREMLILSTDVKFKKEEIIQLGQAGEVEQDLYSLIYIRNKFAHNQLPIKEFFDFCENNYRSISDNEYYAEYYMEIFRSIKEKYAN

SEQ ID NO: 163 - protein, 1214 aa, Flavobacterium columnare
MSSKNESYNKQKTFNHYKQEDKYFFGGFLNNADDNLRQVGKEFKTRINFNHNNNELASVFKDYFNKEKSVAKREHALNLLSNYFPVLERIQKHTNHNFEQTREIFELLLDTIKKLRDYYTHHYHKPITINPKIYDFLDDTLLDVLITIKKKKVKNDTSRELLKEKLRPELTQLKNQKREELIKKGKKLLEENLENAVFNHCLIPFLEENKTDDKQNKTVSLRKYRKSKPNEETSITLTQSGLVFLMSFFLHRKEFQVFTSGLERFKAKVNTIKEEEISLNKNNIVYMITHWSYSYYNFKGLKHRIKTDQGVSTLEQNNTTHSLTNTNTKEALLTQIVDYLSKVPNEIYETLSEKQQKEFEEDINEYMRENPENEDSTFSSIVSHKVIRKRYENKFNYFAMRFLDEYAELPTLRFMVNFGDYIKDRQKKILESIQFDSERIIKKEIHLFEKLSLVTEYKKNVYLKETSNIDLSRFPLFPNPSYVMANNNIPFYIDSRSNNLDEYLNQKKKAQSQNKKRNLTFEKYNKEQSKDAIIAMLQKEIGVKDLQQRSTIGLLSCNELPSMLYEVIVKDIKGAELENKIAQKIREQYQSIRDFTLDSPQKDNIPTTLIKTINTDSSVTFENQPIDIPRLKNALQKELTLTQEKLLNVKEHEIEVDNYNRNKNTYKFKNQPKNKVDDKKLQRKYVFYRNEIRQEANWLASDLIHFMKNKSLWKGYMHNELQSFLAFFEDKKNDCIALLETVFNLKEDCILTKGLKNLFLKHGNFIDFYKEYLKLKEDFLSTESTFLENGFIGLPPKILKKELSKRLKYIFIVFQKRQFIIKELEEKKNNLYADAINLSRGIFDEKPTMIPFKKPNPDEFASWFVASYQYNNYQSFYELTPDIVERDKKKKYKNLRAINKVKIQDYYLKLMVDTLYQDLFNQPLDKSLSDFYVSKAEREKIKADAKAYQKLNDSSLWNKVIHLSLQNNRITANPKLKDIGKYKRALQDEKIATLLTYDARTWTYALQKPEKENENDYKELHYTALNMELQEYEKVRSKELLKQVQELEKKILDKFYDFSNNASHPEDLEIEDKKGKRHPNFKLYITKALLKNESEIINLENIDIEILLKYYDYNTEELKEKIKNMDEDEKAKIINTKENYNKITNVLIKKALVLIIIRNKMAHNQYPPKFIYDLANRFVPKKEEEYFATYFNRVFETITKELWENKEKKDKTQV

SEQ ID NO: 164 - protein, 1119 aa, Porphyromonas gingivalis
MTEQNEKPYNGTYYTLEDKHFWAAFLNLARHNAYITLAHIDRQLAYSKADITNDEDILFFKGQWKNLDNDLERKARLRSLILKHFSFLEGAAYGKKLFESQSSGNKSSKKKELSKKEKEELQANALSLDNLKSILFDFLQKLKDFRNYYSHYRHPESSELPLFDGNMLQRLYNVFDVSVQRVKRDHEHNDKVDPHRHFNHLVRKGKKDKYGNNDNPFFKHHFVDREGTVTEAGLLFFVSLFLEKRDAIWMQKKIRGFKGGTEAYQQMTNEVFCRSRISLPKLKLESLRTDDWMLLDMLNELVRCPKSLYDRLREEDRARFRVPVDILSDEDDTDGTEEDPFKNTLVRHQDRFPYFALRYFDLKKVFTSLRFHIDLGTYHFAIYKKNIGEQPEDRHLTRNLYGFGRIQDFAEEHRPEEWKRLVRDLDYFETGDKPYITQTTPHYHIEKGKIGLRFVPEGQHLWPSPEVGATRTGRSKYAQDKRLTAEAFLSVHELMPMMFYYFLLREKYSEEVSAEKVQGRIKRVIEDVYAVYDAFARDEINTRDELDACLADKGIRRGHLPRQMIAILSQEHKDMEEKVRKKLQEMIADTDHRLDMLDRQTDRKIRIGRKNAGLPKSGVVADWLVRDMMRFQPVAKDTSGKPLNNSKANSTEYRMLQRALALFGGEKERLTPYFRQMNLTGGNNPHPFLHETRWESHTNILSFYRSYLEARKAFLQSIGRSDRVENHRFLLLKEPKTDRQTLVAGWKGEFHLPRGIFTEAVRDCLIEMGYDEVGSYKEVGFMAKAVPLYFERASKDRVQPFYDYPFNVGNSLKPKKGRFLSKEKRAEEWESGKERFRLAKLKKEILEAKEHPYHDFKSWQKFERELRLVKNQDIITWMMCRDLMEENKVEGLDTGTLYLKDIRTDVQEQGSLNVLNRVKPMRLPVVVYRADSRGHVHKEQAPLATVYIEERDTKLLKQGNFKSFVKDRRLNGLFSFVDTGALAMEQYPISKLRVEYELAKYQTARVCAFEQTLELEESLLTRYPHLPDKNFRKMLESWSDPLLDKWPDLHGNVRLLIAVRNAFSHNQYPMYDETLFSSIRKYDPSSPDAIEERMGLNIAHRLSEEVKQAKEMVERIIQA

SEQ ID NO: 165 - protein, 1175 aa, Porphyromonas species
MTEQSERPYNGTYYTLEDKHFWAAFLNLARHNAYITLTHIDRQLAYSKADITNDQDVLSFKALWKNFDNDLERKSRLRSLILKHFSFLEGAAYGKKLFESKSSGNKSSKNKELTKKEKEELQANALSLDNLKSILFDFLQKLKDFRNYYSHYRHSESSELPLFDGNMLQRLYNVFDVSVQRVKRDHEHNDKVDPHRHFNHLVRKGKKDRYGHNDNPSFKHHFVDSEGMVTEAGLLFFVSLFLEKRDAIWMQKKIRGFKGGTETYQQMTNEVFCRSRISLPKLKLESLRTDDWMLLDMLNELVRCPKPLYDRLREDDRACFRVPVDILPDEDDTDGGGEDPFKNTLVRHQDRFPYFALRYFDLKKVFTSLRFHIDLGTYHFAIYKKMIGEQPEDRHLTRNLYGFGRIQDFAEEHRPEEWKRLVRDLDYFETGDKPYISQTTPHYHIEKGKIGLRFVPEGQHLWPSPEVGTTRTGRSKYAQDKRLTAEAFLSVHELMPMMFYYFLLREKYSEEVSAEKVQGRIKRVIEDVYAIYDAFARDEINTLKELDACLADKGIRRGHLPKQMIGILSQERKDMEEKVRKKLQEMIADTDHRLDMLDRQTDRKIRIGRKNAGLPKSGVIADWLVRDMMRFQPVAKDTSGKPLNNSKANSTEYRMLQRALALFGGEKERLTPYFRQMNLTGGNNPHPFLHETRWESHTNILSFYRSYLRARKAFLERIGRSDRVENCPFLLLKEPKTDRQTLVAGWKGEFHLPRGIFTEAVRDCLIEMGYDEVGSYREVGFMAKAVPLYFERACEDRVQPFYDSPFNVGNSLKPKKGRFLSKEDRAEEWERGKERFRDLEAWSHSAARRIKDAFAGIEYASPGNKKKIEQLLRDLSLWEAFESKLKVRADKINLAKLKKEILEAQEHPYHDFKSWQKFERELRLVKNQDIITWMMCRDLMEENKVEGLDTGTLYLKDIRPNVQEQGSLNVLNRVKPMRLPVVVYRADSRGHVHKEEAPLATVYIEERDTKLLKQGNFKSFVKDRRLNGLFSFVDTGGLAMEQYPISKLRVEYELAKYQTARVCVFELTLRLEESLLSRYPHLPDESFREMLESWSDPLLAKWPELHGKVRLLIAVRNAFSHNQYPMYDEAVFSSIRKYDPSSPDAIEERMGLNIAHRLSEEVKQAKETVERIIQA

SEQ ID NO: 166 - protein, 1132 aa, Prevotella intermedia
MEDDKKTKESTNMLDNKHFWAAFLNLARHNVYITVNHINKVLELKNKKDQDIIIDNDQDILAIKTHWEKVNGDLNKTERLRELMTKHFPFLETAIYTKNKEDKEEVKQEKQAKAQSFDSLKHCLFLFLEKLQEARNYYSHYKYSESTKEPMLEKELLKKMYNIFDDNIQLVIKDYQHNKDINPDEDFKHLDRTEEEFNYYFTTNKKGNITASGLLFFVSLFLEKKDAIWMQQKLRGFKDNRESKKKMTHEVFCRSRMLLPKLRLESTQTQDWILLDMLNELIRCPKSLYERLQGEYRKKFNVPFDSADEDYDAEQEPFKNTLVRHQDRFPYFALRYFDYNEIFTNLRFQIDLGTYHFSIYKKLIGGQKEDRHLTHKLYGFERIQEFAKQNRTDEWKAIVKDFDTYETSEEPYISETAPHYHLENQKIGIRFRNDNDEIWPSLKTNGENNEKRKYKLDKQYQAEAFLSVHELLPMMFYYLLLKKEEPNNDKKNASIVEGFIKREIRDIYKLYDAFANGEINNIDDLEKYCEDKGIPKRHLPKQMVAILYDEHKDMAEEAKRKQKEMVKDTKKLLATLEKQTQGEIEDGGRNIRLLKSGEIARWLVNDMMRFQPVQKDNEGNPLNNSKANSTEYQMLQRSLALYNKEEKPTRYFRQVNLINSSNPHPFLKWTKWEECNNILSFYRSYLTKKIEFLNKLKPEDWEKNQYFLKLKEPKTNRETLVQGWKNGFNLPRGIFTEPIREWFKRHQNDSEEYEKVETLDRVGLVTKVIPLFFKKEDSKDKEEYLKKDAQKEINNCVQPFYGFPYNVGNIHKPDEKDFLPSEERKKLWGDKKYKFKGYKAKVKSKKLTDKEKEEYRSYLEFQSWNKFERELRLVRNQDIVTWLLCTELIDKLKVEGLNVEELKKLRLKDIDTDTAKQEKNNILNRVMPMQLPVTVYEIDDSHNIVKDRPLHTVYIEETKTKLLKQGNFKALVKDRRLNGLFSFVDTSSETELKSNPISKSLVEYELGEYQNARIETIKDMLLLEETLIEKYKTLPTDNFSDMLNGWLEGKDEADKARFQNDVKLLVAVRNAFSHNQYPMRNRIAFANINPFSLSSADTSEEKKLDIANQLKDKTHKIIKRIIEIEKPIETKE

SEQ ID NO: 167 - DNA, 30 bp, Artificial Sequence
  Synthetic Oligonucleotide
gggcattggcttccatctctttgagcacct

SEQ ID NO: 168 - DNA, 30 bp, Artificial Sequence
  Synthetic Oligonucleotide
gcagggttttcccagtcacgacgttgtaaa

SEQ ID NO: 169 - DNA, 30 bp, Artificial Sequence
  Synthetic Oligonucleotide
gaagtcttcgttgttctcggtgggcttggc

SEQ ID NO: 170 - DNA, 30 bp, Artificial Sequence; identical to SEQ ID NO: 167
  Synthetic Oligonucleotide

SEQ ID NO: 171 - DNA, 30 bp, Artificial Sequence
  Synthetic Oligonucleotide
gacaggcagatcagacagcccctggtgcag

SEQ ID NO: 172 - DNA, 30 bp, Artificial Sequence
  Synthetic Oligonucleotide
gtaggtgtggcagcgtcctgggatgaactt

SEQ ID NO: 173 - DNA, 30 bp, Artificial Sequence
  Synthetic Oligonucleotide
ggaatgtcgacgatcgcctcgcctatgccg

SEQ ID NO: 174 - DNA, 28 bp, Artificial Sequence
  Synthetic Oligonucleotide
agtcttcgttgttctcggtgggcttggc

SEQ ID NO: 175 - DNA, 28 bp, Artificial Sequence
  Synthetic Oligonucleotide
gcattggcttccatctctttgagcacct

SEQ ID NO: 176 - DNA, 28 bp, Artificial Sequence
  Synthetic Oligonucleotide
caggcagatcagacagcccctggtgcag

SEQ ID NO: 177 - DNA, 28 bp, Artificial Sequence
  Synthetic Oligonucleotide
aggtgtggcagcgtcctgggatgaactt

SEQ ID NO: 178 - DNA, 28 bp, Artificial Sequence
  Synthetic Oligonucleotide
aatgtcgacgatcgcctcgcctatgccg

SEQ ID NO: 179 - DNA, 30 bp, Artificial Sequence; identical to SEQ ID NO: 168
  Synthetic Oligonucleotide

SEQ ID NO: 180 - DNA, 28 bp, Artificial Sequence
  Synthetic Oligonucleotide
agggttttcccagtcacgacgttgtaaa

SEQ ID NO: 181 - DNA, 30 bp, Artificial Sequence; identical to SEQ ID NO: 167
  Synthetic Oligonucleotide

SEQ ID NO: 182 - DNA, 30 bp, Artificial Sequence; identical to SEQ ID NO: 168
  Synthetic Oligonucleotide

SEQ ID NO: 183 - protein, 7 aa, Artificial Sequence
  Synthetic Peptide
GSGGGGS

SEQ ID NO: 184 - protein, 15 aa, Artificial Sequence
  Synthetic Peptide
GGGGSGGGGSGGGGS

SEQ ID NO: 185 - protein, 5 aa, Artificial Sequence
  Synthetic Peptide
EAAAK

SEQ ID NO: 186 - protein, 18 aa, Artificial Sequence
  Synthetic Peptide
GGSGGSGGSGGSGGSGGS

SEQ ID NO: 187 - protein, 16 aa, Artificial Sequence
  Synthetic Peptide
SGSETPGTSESATPES

SEQ ID NO: 188 - protein, 7 aa, Artificial Sequence
  Synthetic Peptide
GSGGGGS

SEQ ID NO: 189 - protein, 7 aa, Artificial Sequence
  Synthetic Peptide
GSGGGGS

SEQ ID NO: 190 - protein, 7 aa, Artificial Sequence
  Synthetic Peptide
GSGGGGS

SEQ ID NO: 191 - protein, 15 aa, Artificial Sequence
  Synthetic Peptide
GGGGSGGGGSGGGGS

SEQ ID NO: 192 - protein, 5 aa, Artificial Sequence
  Synthetic Peptide
EAAAK

SEQ ID NO: 193 - protein, 18 aa, Artificial Sequence
  Synthetic Peptide
GGSGGSGGSGGSGGSGGS

SEQ ID NO: 194 - protein, 16 aa, Artificial Sequence
  Synthetic Peptide
SGSETPGTSESATPES

SEQ ID NO: 195 - RNA, 28 nt, Artificial Sequence
  Synthetic Oligonucleotide
gccagcuuuccgggcauuggcuuccauc

SEQ ID NO: 196 - DNA, 28 bp, Artificial Sequence
  Synthetic Oligonucleotide
gccagctttccgggcattggcttccatc

SEQ ID NO: 197 - DNA, 28 bp, Artificial Sequence
  Synthetic Oligonucleotide
acccaggaatctcaggaatgtcgacgat

SEQ ID NO: 198 - DNA, 28 bp, Artificial Sequence
  Synthetic Oligonucleotide
agggttttcccagtcacgacgttgtaaa

SEQ ID NO: 199 - DNA, 30 bp, Artificial Sequence; identical to SEQ ID NO: 167
  Synthetic Oligonucleotide

SEQ ID NO: 200 - RNA, 30 nt, Artificial Sequence
  Synthetic Oligonucleotide
gugcagccagcuuuccgggcauuggcuucc

SEQ ID NO: 201 - RNA, 30 nt, Artificial Sequence
  Synthetic Oligonucleotide
gcagccagcuuuccgggcauuggcuuccau

SEQ ID NO: 202 - RNA, 30 nt, Artificial Sequence
  Synthetic Oligonucleotide
ggcuuccaucucuuugagcaccuccagcgg

SEQ ID NO: 203 - RNA, 30 nt, Artificial Sequence
  Synthetic Oligonucleotide
ggaaugucgacgaucgccucgccuaugccg

SEQ ID NO: 204 - RNA, 30 nt, Artificial Sequence
  Synthetic Oligonucleotide
gaaugucgacgaucgccucgccuaugccgc

SEQ ID NO: 205 - RNA, 30 nt, Artificial Sequence
  Synthetic Oligonucleotide
gaccugugcgaugaacugcuccaugggcuc

SEQ ID NO: 206 - RNA, 30 nt, Artificial Sequence
  Synthetic Oligonucleotide
guguggcagcguccugggaugaacuucuuc

SEQ ID NO: 207 - RNA, 30 nt, Artificial Sequence
  Synthetic Oligonucleotide
guggcagcguccugggaugaacuucuucau

SEQ ID NO: 208 - RNA, 30 nt, Artificial Sequence
  Synthetic Oligonucleotide
gcuucuugccgggcaacuucccgcggucag

SEQ ID NO: 209 - RNA, 31 nt, Artificial Sequence
  Synthetic Oligonucleotide
gcaggguuuucccagucacgacguuguaaaa

SEQ ID NO: 210 - RNA, 31 nt, Artificial Sequence; identical to SEQ ID NO: 209
  Synthetic Oligonucleotide

SEQ ID NO: 211 - RNA, 28 nt, Artificial Sequence
  Synthetic Oligonucleotide
acccaggaaucucaggaaugucgacgau

SEQ ID NO: 212 - DNA, 21 bp, Artificial Sequence
  Synthetic Oligonucleotide
cagctttccgggcattggctt

SEQ ID NO: 213 - RNA, 30 nt, Artificial Sequence
  Synthetic Oligonucleotide
ccgcuggaggugcucaaagagauggaagcc

SEQ ID NO: 214 - DNA, 28 bp, Artificial Sequence
  Synthetic Oligonucleotide
gccagctttccgggcattggcttccatc

SEQ ID NO: 215 - DNA, 28 bp, Artificial Sequence
  Synthetic Oligonucleotide
acccaggaatctcaggaatgtcgacgat

SEQ ID NO: 216 - DNA, 30 bp, Artificial Sequence; identical to SEQ ID NO: 167
  Synthetic Oligonucleotide

SEQ ID NO: 217 - RNA, 30 nt, Artificial Sequence; identical to SEQ ID NO: 204
  Synthetic Oligonucleotide

SEQ ID NO: 218 - DNA, 28 bp, Artificial Sequence
  Synthetic Oligonucleotide
caaggcactcttgcctacgccaccagct

SEQ ID NO: 219 - DNA, 28 bp, Artificial Sequence
  Synthetic Oligonucleotide
tcatattcgtccacaaaatgattctgaa

SEQ ID NO: 220 - DNA, 28 bp, Artificial Sequence
  Synthetic Oligonucleotide
attatttatggcaaatacacaaagaaag

SEQ ID NO: 221 - DNA, 28 bp, Artificial Sequence
  Synthetic Oligonucleotide
gaatatcttcaaatgatttagtattatt

SEQ ID NO: 222 - DNA, 28 bp, Artificial Sequence
  Synthetic Oligonucleotide
accataggtacatcttcagagtccttaa

SEQ ID NO: 223 - DNA, 30 bp, Artificial Sequence
  Synthetic Oligonucleotide
gtcaaggcactcttgcctacgccaccagct

SEQ ID NO: 224 - DNA, 30 bp, Artificial Sequence
  Synthetic Oligonucleotide
gatcatattcgtccacaaaatgattctgaa

SEQ ID NO: 225 - DNA, 30 bp, Artificial Sequence
  Synthetic Oligonucleotide
gtattatttatggcaaatacacaaagaaag

SEQ ID NO: 226 - DNA, 30 bp, Artificial Sequence
  Synthetic Oligonucleotide
gtgaatatcttcaaatgatttagtattatt

SEQ ID NO: 227 - DNA, 30 bp, Artificial Sequence
  Synthetic Oligonucleotide
ggaccataggtacatcttcagagtccttaa

SEQ ID NO: 228 - DNA, 50 bp, Artificial Sequence
  Synthetic Oligonucleotide
aagagtgccttgacgatacagcctcgaggctgtatcgtcaaggcactctt

SEQ ID NO: 229 - DNA, 48 bp, Artificial Sequence
  Synthetic Oligonucleotide
aatcattttgtggacgaatatctcgagatattcgtccacaaaatgatt

SEQ ID NO: 230 - DNA, 48 bp, Artificial Sequence
  Synthetic Oligonucleotide
aaataatactaaatcatttgactcgagtcaaatgatttagtattattt

SEQ ID NO: 231 - DNA, 48 bp, Artificial Sequence
  Synthetic Oligonucleotide
aataatactaaatcatttgaactcgagttcaaatgatttagtattatt

SEQ ID NO: 232 - DNA, 48 bp, Artificial Sequence
  Synthetic Oligonucleotide
aaggactctgaagatgtacctctcgagaggtacatcttcagagtcctt

SEQ ID NO: 233 - DNA, 30 bp, Artificial Sequence
  Synthetic Oligonucleotide
gagatcagggcaaacagaactttgactccc

SEQ ID NO: 234 - DNA, 30 bp, Artificial Sequence
  Synthetic Oligonucleotide
ggatgcagatcagggcaaacagaactttga

SEQ ID NO: 235 - DNA, 30 bp, Artificial Sequence
  Synthetic Oligonucleotide
gcacagcgatgcagatcagggcaaacagaa

SEQ ID NO: 236 - DNA, 30 bp, Artificial Sequence
  Synthetic Oligonucleotide
gctcggccacagcgatgcagatcagggcaa

SEQ ID NO: 237 - DNA, 30 bp, Artificial Sequence
  Synthetic Oligonucleotide
ggggcttggcctcggccacagcgatgcaga

SEQ ID NO: 238 - DNA, 30 bp, Artificial Sequence
  Synthetic Oligonucleotide
gtgggcttggcctcggccacagcgatgcag

SEQ ID NO: 239 - DNA, 30 bp, Artificial Sequence
  Synthetic Oligonucleotide
gtctcggtgggcttggcctcggccacagcg

SEQ ID NO: 240 - DNA, 30 bp, Artificial Sequence
  Synthetic Oligonucleotide
gttcgttgttctcggtgggcttggcctcgg

SEQ ID NO: 241 - DNA, 30 bp, Artificial Sequence
  Synthetic Oligonucleotide
ggaagtcttcgttgttctcggtgggcttgg

SEQ ID NO: 242 - DNA, 30 bp, Artificial Sequence
  Synthetic Oligonucleotide
gatgttgaagtcttcgttgttctcggtggg

SEQ ID NO: 243 - DNA, 30 bp, Artificial Sequence
  Synthetic Oligonucleotide
gcggccacgatgttgaagtcttcgttgttc

SEQ ID NO: 244 - DNA, 30 bp, Artificial Sequence
  Synthetic Oligonucleotide
gtggccacggccacgatgttgaagtcttcg

SEQ ID NO: 245 - DNA, 30 bp, Artificial Sequence
  Synthetic Oligonucleotide
ggttgctggccacggccacgatgttgaagt

SEQ ID NO: 246 - DNA, 30 bp, Artificial Sequence
  Synthetic Oligonucleotide
gtcgcgaagttgctggccacggccacgatg

SEQ ID NO: 247 - DNA, 30 bp, Artificial Sequence
  Synthetic Oligonucleotide
gccgtggtcgcgaagttgctggccacggcc

SEQ ID NO: 248 - DNA, 30 bp, Artificial Sequence
  Synthetic Oligonucleotide
gcgagatccgtggtcgcgaagttgctggcc

SEQ ID NO: 249 - DNA, 30 bp, Artificial Sequence
  Synthetic Oligonucleotide
gcagcatcgagatccgtggtcgcgaagttg

SEQ ID NO: 250 - DNA, 30 bp, Artificial Sequence
  Synthetic Oligonucleotide
gggtcagcatcgagatccgtggtcgcgaag

SEQ ID NO: 251 - DNA, 30 bp, Artificial Sequence
  Synthetic Oligonucleotide
gcttcccgcggtcagcatcgagatccgtgg

SEQ ID NO: 252 - DNA, 30 bp, Artificial Sequence
  Synthetic Oligonucleotide
ggggcaacttcccgcggtcagcatcgagat

SEQ ID NO: 253 - DNA, 30 bp, Artificial Sequence
  Synthetic Oligonucleotide
gtcttgccgggcaacttcccgcggtcagca

SEQ ID NO: 254 - DNA, 30 bp, Artificial Sequence
  Synthetic Oligonucleotide
ggcagcttcttgccgggcaacttcccgcgg

SEQ ID NO: 255 - DNA, 30 bp, Artificial Sequence
  Synthetic Oligonucleotide
gccagcggcagcttcttgccgggcaacttc

SEQ ID NO: 256 - DNA, 30 bp, Artificial Sequence
  Synthetic Oligonucleotide
gcacctccagcggcagcttcttgccgggca

SEQ ID NO: 257 - DNA, 30 bp, Artificial Sequence
  Synthetic Oligonucleotide
gctttgagcacctccagcggcagcttcttg

SEQ ID NO: 258 - DNA, 30 bp, Artificial Sequence
  Synthetic Oligonucleotide
gcatctctttgagcacctccagcggcagct

SEQ ID NO: 259 - DNA, 30 bp, Artificial Sequence
  Synthetic Oligonucleotide
gtccatctctttgagcacctccagcggcag

SEQ ID NO: 260 - DNA, 30 bp, Artificial Sequence; identical to SEQ ID NO: 167
  Synthetic Oligonucleotide

SEQ ID NO: 261 - DNA, 30 bp, Artificial Sequence
  Synthetic Oligonucleotide
gtccgggcattggcttccatctctttgagc

SEQ ID NO: 262 - DNA, 30 bp, Artificial Sequence
  Synthetic Oligonucleotide
ggccagctttccgggcattggcttccatct

SEQ ID NO: 263 - DNA, 30 bp, Artificial Sequence
  Synthetic Oligonucleotide
gggtgcagccagctttccgggcattggctt

SEQ ID NO: 264 - DNA, 30 bp, Artificial Sequence
  Synthetic Oligonucleotide
gagcccctggtgcagccagctttccgggca

SEQ ID NO: 265 - DNA, 30 bp, Artificial Sequence
  Synthetic Oligonucleotide
gatcagacagcccctggtgcagccagcttt

SEQ ID NO: 266 - DNA, 30 bp, Artificial Sequence
  Synthetic Oligonucleotide
ggcagatcagacagcccctggtgcagccag

SEQ ID NO: 267 - DNA, 30 bp, Artificial Sequence; identical to SEQ ID NO: 171
  Synthetic Oligonucleotide

SEQ ID NO: 268 - DNA, 30 bp, Artificial Sequence
  Synthetic Oligonucleotide
gtgatgtgggacaggcagatcagacagccc

SEQ ID NO: 269 - DNA, 30 bp, Artificial Sequence
  Synthetic Oligonucleotide
gacttgatgtgggacaggcagatcagacag

SEQ ID NO: 270 - DNA, 30 bp, Artificial Sequence
  Synthetic Oligonucleotide
ggggcgtgcacttgatgtgggacaggcaga

SEQ ID NO: 271 - DNA, 30 bp, Artificial Sequence
  Synthetic Oligonucleotide
gcttcatcttgggcgtgcacttgatgtggg

SEQ ID NO: 272 - DNA, 30 bp, Artificial Sequence
  Synthetic Oligonucleotide
gtgaacttcttcatcttgggcgtgcacttg

SEQ ID NO: 273 - DNA, 30 bp, Artificial Sequence
  Synthetic Oligonucleotide
gggatgaacttcttcatcttgggcgtgcac

SEQ ID NO: 274 - DNA, 30 bp, Artificial Sequence
  Synthetic Oligonucleotide
gtgggatgaacttcttcatcttgggcgtgc

SEQ ID NO: 275 - DNA, 30 bp, Artificial Sequence
  Synthetic Oligonucleotide
gggcagcgtcctgggatgaacttcttcatc

SEQ ID NO: 276 - DNA, 30 bp, Artificial Sequence
  Synthetic Oligonucleotide
gggtgtggcagcgtcctgggatgaacttct

SEQ ID NO: 277 - DNA, 30 bp, Artificial Sequence
  Synthetic Oligonucleotide
gttcgtaggtgtggcagcgtcctgggatga

SEQ ID NO: 278 - DNA, 30 bp, Artificial Sequence
  Synthetic Oligonucleotide
gcgccttcgtaggtgtggcagcgtcctggg

SEQ ID NO: 279 - DNA, 30 bp, Artificial Sequence
  Synthetic Oligonucleotide
gtctttgtcgccttcgtaggtgtggcagcg

SEQ ID NO: 280 - DNA, 30 bp, Artificial Sequence
  Synthetic Oligonucleotide
gctttgtcgccttcgtaggtgtggcagcgt

SEQ ID NO: 281 - DNA, 30 bp, Artificial Sequence
  Synthetic Oligonucleotide
gtgccgccctgtgcggactctttgtcgcct

SEQ ID NO: 282 - DNA, 30 bp, Artificial Sequence
  Synthetic Oligonucleotide
gtatgccgccctgtgcggactctttgtcgc

SEQ ID NO: 283 - DNA, 30 bp, Artificial Sequence
  Synthetic Oligonucleotide
gcctcgcctatgccgccctgtgcggactct

SEQ ID NO: 284 - DNA, 30 bp, Artificial Sequence
  Synthetic Oligonucleotide
ggatcgcctcgcctatgccgccctgtgcgg

SEQ ID NO: 285 - DNA, 30 bp, Artificial Sequence
  Synthetic Oligonucleotide
gatgtcgacgatcgcctcgcctatgccgcc

SEQ ID NO: 286 - DNA, 30 bp, Artificial Sequence
  Synthetic Oligonucleotide
gcaggaatgtcgacgatcgcctcgcctatg

SEQ ID NO: 287 - DNA, 30 bp, Artificial Sequence
  Synthetic Oligonucleotide
gaatctcaggaatgtcgacgatcgcctcgc

SEQ ID NO: 288 - DNA, 30 bp, Artificial Sequence
  Synthetic Oligonucleotide
gcccaggaatctcaggaatgtcgacgatcg

SEQ ID NO: 289 - DNA, 30 bp, Artificial Sequence
  Synthetic Oligonucleotide
gccttgaacccaggaatctcaggaatgtcg

SEQ ID NO: 290 - DNA, 30 bp, Artificial Sequence
  Synthetic Oligonucleotide
gccaagtccttgaacccaggaatctcagga

SEQ ID NO: 291 - DNA, 30 bp, Artificial Sequence
  Synthetic Oligonucleotide
gtgggctccaagtccttgaacccaggaatc

SEQ ID NO: 292 - DNA, 30 bp, Artificial Sequence
  Synthetic Oligonucleotide
gccatgggctccaagtccttgaacccagga

SEQ ID NO: 293 - DNA, 30 bp, Artificial Sequence
  Synthetic Oligonucleotide
ggaactgctccatgggctccaagtccttga

SEQ ID NO: 294 - DNA, 30 bp, Artificial Sequence
  Synthetic Oligonucleotide
gtgcgatgaactgctccatgggctccaagt

SEQ ID NO: 295 - DNA, 30 bp, Artificial Sequence
  Synthetic Oligonucleotide
ggacctgtgcgatgaactgctccatgggct

SEQ ID NO: 296 - DNA, 30 bp, Artificial Sequence
  Synthetic Oligonucleotide
gacagatcgacctgtgcgatgaactgctcc

SEQ ID NO: 297 - DNA, 30 bp, Artificial Sequence
  Synthetic Oligonucleotide
gacacacagatcgacctgtgcgatgaactg

SEQ ID NO: 298 - DNA, 30 bp, Artificial Sequence
  Synthetic Oligonucleotide
gtgcagtccacacacagatcgacctgtgcg

SEQ ID NO: 299 - DNA, 30 bp, Artificial Sequence
  Synthetic Oligonucleotide
gccagttgtgcagtccacacacagatcgac

SEQ ID NO: 300 - DNA, 30 bp, Artificial Sequence
  Synthetic Oligonucleotide
gggcagccagttgtgcagtccacacacaga

SEQ ID NO: 301 - DNA, 30 bp, Artificial Sequence
  Synthetic Oligonucleotide
gtttgaggcagccagttgtgcagtccacac

SEQ ID NO: 302 - DNA, 30 bp, Artificial Sequence
  Synthetic Oligonucleotide
gaagccctttgaggcagccagttgtgcagt

SEQ ID NO: 303 - DNA, 30 bp, Artificial Sequence
  Synthetic Oligonucleotide
gcacgttggcaagccctttgaggcagccag

SEQ ID NO: 304 - DNA, 30 bp, Artificial Sequence
  Synthetic Oligonucleotide
gactgcacgttggcaagccctttgaggcag

SEQ ID NO: 305 - DNA, 30 bp, Artificial Sequence
  Synthetic Oligonucleotide
gggtcagaacactgcacgttggcaagccct

SEQ ID NO: 306 - DNA, 30 bp, Artificial Sequence
  Synthetic Oligonucleotide
gcaggtcagaacactgcacgttggcaagcc

SEQ ID NO: 307 - DNA, 30 bp, Artificial Sequence
  Synthetic Oligonucleotide
gagcaggtcagaacactgcacgttggcaag

SEQ ID NO: 308 - DNA, 30 bp, Artificial Sequence
  Synthetic Oligonucleotide
ggccacttcttgagcaggtcagaacactgc

SEQ ID NO: 309 - DNA, 30 bp, Artificial Sequence
  Synthetic Oligonucleotide
gcggcagccacttcttgagcaggtcagaac

SEQ ID NO: 310 - DNA, 30 bp, Artificial Sequence
  Synthetic Oligonucleotide
gtgcggcagccacttcttgagcaggtcaga

SEQ ID NO: 311 - DNA, 30 bp, Artificial Sequence
  Synthetic Oligonucleotide
gagcgttgcggcagccacttcttgagcagg

SEQ ID NO: 312 - DNA, 30 bp, Artificial Sequence
  Synthetic Oligonucleotide
gaaaggtcgcacagcgttgcggcagccact

SEQ ID NO: 313 - DNA, 30 bp, Artificial Sequence
  Synthetic Oligonucleotide
gctggcaaaggtcgcacagcgttgcggcag

SEQ ID NO: 314 - DNA, 30 bp, Artificial Sequence
  Synthetic Oligonucleotide
gggcaaaggtcgcacagcgttgcggcagcc

SEQ ID NO: 315 - DNA, 30 bp, Artificial Sequence
  Synthetic Oligonucleotide
gtggatcttgctggcaaaggtcgcacagcg

SEQ ID NO: 316 - DNA, 30 bp, Artificial Sequence
  Synthetic Oligonucleotide
gcacctggccctggatcttgctggcaaagg

SEQ ID NO: 317 - DNA, 30 bp, Artificial Sequence
  Synthetic Oligonucleotide
gtggccctggatcttgctggcaaaggtcgc

SEQ ID NO: 318 - DNA, 30 bp, Artificial Sequence
  Synthetic Oligonucleotide
gtgatcttgtccacctggccctggatcttg

SEQ ID NO: 319 - DNA, 30 bp, Artificial Sequence
  Synthetic Oligonucleotide
gccccttgatcttgtccacctggccctgga

SEQ ID NO: 320 - DNA, 30 bp, Artificial Sequence
  Synthetic Oligonucleotide
gcccttgatcttgtccacctggccctggat

SEQ ID NO: 321 - DNA, 30 bp, Artificial Sequence
  Synthetic Oligonucleotide
gccttgatcttgtccacctggccctggatc

SEQ ID NO: 322 - DNA, 30 bp, Artificial Sequence
  Synthetic Oligonucleotide
ggcaaaggtcgcacagcgttgcggcagcca

SEQ ID NO: 323 - DNA, 30 bp, Artificial Sequence
  Synthetic Oligonucleotide
gcaaaggtcgcacagcgttgcggcagccac

SEQ ID NO: 324 - DNA, 30 bp, Artificial Sequence
  Synthetic Oligonucleotide
gaaggtcgcacagcgttgcggcagccactt

SEQ ID NO: 325 - DNA, 30 bp, Artificial Sequence
  Synthetic Oligonucleotide
gaggtcgcacagcgttgcggcagccacttc

SEQ ID NO: 326 - DNA, 31 bp, Artificial Sequence
  Synthetic Oligonucleotide
ggtaatgcctggcttgtcgacgcatagtctg

SEQ ID NO: 327 - DNA, 31 bp, Artificial Sequence
  Synthetic Oligonucleotide
gggaaccttggccgttataaagtctgaccag

SEQ ID NO: 328 - DNA, 31 bp, Artificial Sequence
  Synthetic Oligonucleotide
ggagggtgagaatttagaaccaagattgttg

SEQ ID NO: 329 - DNA, 30 bp, Artificial Sequence
  Synthetic Oligonucleotide
gagtcctggcaatgaacagtggcgcagtag

SEQ ID NO: 330 - DNA, 30 bp, Artificial Sequence
  Synthetic Oligonucleotide
gggtgccacagctgctatcaatacattctc

SEQ ID NO: 331 - DNA, 30 bp, Artificial Sequence
  Synthetic Oligonucleotide
gttacatactgacacattcggcaacatgtt

SEQ ID NO: 332 - DNA, 30 bp, Artificial Sequence
  Synthetic Oligonucleotide
gtatgtaccaggttcctggaactggaatct

SEQ ID NO: 333 - DNA, 30 bp, Artificial Sequence
  Synthetic Oligonucleotide
gccttggttccatccaggttctccagggtg

SEQ ID NO: 334 - DNA, 30 bp, Artificial Sequence
  Synthetic Oligonucleotide
gcagtgatgggattctcagtagcttgagcg

SEQ ID NO: 335 - DNA, 30 bp, Artificial Sequence
  Synthetic Oligonucleotide
gagcctggcatctcaacaacagcgatggtg

SEQ ID NO: 336 - DNA, 30 bp, Artificial Sequence
  Synthetic Oligonucleotide
gtgtctggggcgattcttacagatcttcct

SEQ ID NO: 337 - DNA, 30 bp, Artificial Sequence
  Synthetic Oligonucleotide
gctggatctgaagtgaagtctgtatcttcc

SEQ ID NO: 338 - DNA, 30 bp, Artificial Sequence
  Synthetic Oligonucleotide
ggcaacgtcatcaggatttccatagagtgg

SEQ ID NO: 339 - DNA, 30 bp, Artificial Sequence
  Synthetic Oligonucleotide
gaggcgcaggagatggtgtagtagtagaag

SEQ ID NO: 340 - DNA, 30 bp, Artificial Sequence
  Synthetic Oligonucleotide
gagggaccctggaattggtatcttgctttg

SEQ ID NO: 341 - DNA, 30 bp, Artificial Sequence
  Synthetic Oligonucleotide
ggtaagagtcaacattcctgtgtgaaacct

SEQ ID NO: 342 - DNA, 30 bp, Artificial Sequence
  Synthetic Oligonucleotide
gaccagaatctgttttccatcaacaatgag

SEQ ID NO: 343 - DNA, 30 bp, Artificial Sequence
  Synthetic Oligonucleotide
gatggctgtagtcagtatgtcaccatcttg

SEQ ID NO: 344 - DNA, 30 bp, Artificial Sequence
  Synthetic Oligonucleotide
gtaccatcgaatggatctctaatatgtacg

SEQ ID NO: 345 - DNA, 30 bp, Artificial Sequence
  Synthetic Oligonucleotide
gagatcacaggctccttcagcatcaaaaga

SEQ ID NO: 346 - DNA, 30 bp, Artificial Sequence
  Synthetic Oligonucleotide
gctttgaccggcgaagagactattgcagag

SEQ ID NO: 347 - DNA, 30 bp, Artificial Sequence
  Synthetic Oligonucleotide
gcccctcaggcaatactcgtacatgcatcg

SEQ ID NO: 348 - DNA, 30 bp, Artificial Sequence
  Synthetic Oligonucleotide
gctggtacttctagggtgtctccatgcttt

SEQ ID NO: 349 - DNA, 31 bp, Artificial Sequence; identical to SEQ ID NO: 326
  Synthetic Oligonucleotide

SEQ ID NO: 350 - DNA, 31 bp, Artificial Sequence; identical to SEQ ID NO: 327
  Synthetic Oligonucleotide

SEQ ID NO: 351 - DNA, 31 bp, Artificial Sequence; identical to SEQ ID NO: 328
  Synthetic Oligonucleotide

SEQ ID NO: 352 - DNA, 31 bp, Artificial Sequence
  Synthetic Oligonucleotide
gcatcctgcggcctctactctgcattcaatt

SEQ ID NO: 353 - DNA, 31 bp, Artificial Sequence
  Synthetic Oligonucleotide
gaccatcctgcggcctctactctgcattcaa

SEQ ID NO: 354 - DNA, 31 bp, Artificial Sequence
  Synthetic Oligonucleotide
gaaaccatcctgcggcctctactctgcattc

SEQ ID NO: 355 - DNA, 31 bp, Artificial Sequence
  Synthetic Oligonucleotide
gctaaaccatcctgcggcctctactctgcat

SEQ ID NO: 356 - DNA, 31 bp, Artificial Sequence
  Synthetic Oligonucleotide
gttctaaaccatcctgcggcctctactctgc

SEQ ID NO: 357 - DNA, 31 bp, Artificial Sequence
  Synthetic Oligonucleotide
gtgttctaaaccatcctgcggcctctactct

SEQ ID NO: 358 - DNA, 31 bp, Artificial Sequence
  Synthetic Oligonucleotide
gaatgttctaaaccatcctgcggcctctact

SEQ ID NO: 359 - DNA, 31 bp, Artificial Sequence
  Synthetic Oligonucleotide
gagaatgttctaaaccatcctgcggcctcta

SEQ ID NO: 360 - DNA, 31 bp, Artificial Sequence
  Synthetic Oligonucleotide
gatagaatgttctaaaccatcctgcggcctc

SEQ ID NO: 361 - DNA, 31 bp, Artificial Sequence
  Synthetic Oligonucleotide
gccatagaatgttctaaaccatcctgcggcc

SEQ ID NO: 362 - DNA, 31 bp, Artificial Sequence
  Synthetic Oligonucleotide
gttccatagaatgttctaaaccatcctgcgg

SEQ ID NO: 363 - DNA, 31 bp, Artificial Sequence
  Synthetic Oligonucleotide
gctttccatagaatgttctaaaccatcctgc

SEQ ID NO: 364 - DNA, 31 bp, Artificial Sequence
  Synthetic Oligonucleotide
gctctttccatagaatgttctaaaccatcct

SEQ ID NO: 365 - DNA, 31 bp, Artificial Sequence
  Synthetic Oligonucleotide
gatctctttccatagaatgttctaaaccatc

SEQ ID NO: 366 - DNA, 31 bp, Artificial Sequence
  Synthetic Oligonucleotide
ggaatctctttccatagaatgttctaaacca

SEQ ID NO: 367 - DNA, 51 bp, Artificial Sequence
  Synthetic Oligonucleotide
gcatcctgcggcctctactctgcattcaattacatactgacacattcggca

SEQ ID NO: 368 - DNA, 51 bp, Artificial Sequence
  Synthetic Oligonucleotide
gaccatcctgcggcctctactctgcattcaattacatactgacacattcgg

SEQ ID NO: 369 - DNA, 51 bp, Artificial Sequence
  Synthetic Oligonucleotide
gaaaccatcctgcggcctctactctgcattcaattacatactgacacattc

SEQ ID NO: 370 - DNA, 51 bp, Artificial Sequence
  Synthetic Oligonucleotide
gctaaaccatcctgcggcctctactctgcattcaattacatactgacacat

SEQ ID NO: 371 - DNA, 51 bp, Artificial Sequence
  Synthetic Oligonucleotide
gttctaaaccatcctgcggcctctactctgcattcaattacatactgacac

SEQ ID NO: 372 - DNA, 51 bp, Artificial Sequence
  Synthetic Oligonucleotide
gtgttctaaaccatcctgcggcctctactctgcattcaattacatactgac

SEQ ID NO: 373 - DNA, 51 bp, Artificial Sequence
  Synthetic Oligonucleotide
gaatgttctaaaccatcctgcggcctctactctgcattcaattacatactg

SEQ ID NO: 374 - DNA, 51 bp, Artificial Sequence
  Synthetic Oligonucleotide
gagaatgttctaaaccatcctgcggcctctactctgcattcaattacatac

SEQ ID NO: 375 - DNA, 51 bp, Artificial Sequence
  Synthetic Oligonucleotide
gatagaatgttctaaaccatcctgcggcctctactctgcattcaattacat

SEQ ID NO: 376 - DNA, 51 bp, Artificial Sequence
  Synthetic Oligonucleotide
gccatagaatgttctaaaccatcctgcggcctctactctgcattcaattac

SEQ ID NO: 377 - DNA, 51 bp, Artificial Sequence
  Synthetic Oligonucleotide
gttccatagaatgttctaaaccatcctgcggcctctactctgcattcaatt

SEQ ID NO: 378 - DNA, 51 bp, Artificial Sequence
  Synthetic Oligonucleotide
gctttccatagaatgttctaaaccatcctgcggcctctactctgcattcaa

SEQ ID NO: 379 - DNA, 51 bp, Artificial Sequence
  Synthetic Oligonucleotide
gctctttccatagaatgttctaaaccatcctgcggcctctactctgcattc

SEQ ID NO: 380 - DNA, 51 bp, Artificial Sequence
  Synthetic Oligonucleotide
gatctctttccatagaatgttctaaaccatcctgcggcctctactctgcat

SEQ ID NO: 381 - DNA, 51 bp, Artificial Sequence
  Synthetic Oligonucleotide
ggaatctctttccatagaatgttctaaaccatcctgcggcctctactctgc

SEQ ID NO: 382 - DNA, 51 bp, Artificial Sequence
  Synthetic Oligonucleotide
gtggaatctctttccatagaatgttctaaaccatcctgcggcctctactct

SEQ ID NO: 383 - DNA, 51 bp, Artificial Sequence
  Synthetic Oligonucleotide
gactggaatctctttccatagaatgttctaaaccatcctgcggcctctact

SEQ ID NO: 384 - DNA, 51 bp, Artificial Sequence
  Synthetic Oligonucleotide
ggaactggaatctctttccatagaatgttctaaaccatcctgcggcctcta

SEQ ID NO: 385 - DNA, 51 bp, Artificial Sequence
  Synthetic Oligonucleotide
gtggaactggaatctctttccatagaatgttctaaaccatcctgcggcctc

SEQ ID NO: 386 - DNA, 51 bp, Artificial Sequence
  Synthetic Oligonucleotide
gcctggaactggaatctctttccatagaatgttctaaaccatcctgcggcc

SEQ ID NO: 387 - DNA, 51 bp, Artificial Sequence
  Synthetic Oligonucleotide
gttcctggaactggaatctctttccatagaatgttctaaaccatcctgcgg

SEQ ID NO: 388 - DNA, 51 bp, Artificial Sequence
  Synthetic Oligonucleotide
gggttcctggaactggaatctctttccatagaatgttctaaaccatcctgc

SEQ ID NO: 389 - DNA, 51 bp, Artificial Sequence
  Synthetic Oligonucleotide
gcaggttcctggaactggaatctctttccatagaatgttctaaaccatcct

SEQ ID NO: 390 - DNA, 51 bp, Artificial Sequence
  Synthetic Oligonucleotide
gaccaggttcctggaactggaatctctttccatagaatgttctaaaccatc

SEQ ID NO: 391 - DNA, 51 bp, Artificial Sequence
  Synthetic Oligonucleotide
ggtaccaggttcctggaactggaatctctttccatagaatgttctaaacca

SEQ ID NO: 392 - DNA, 71 bp, Artificial Sequence
  Synthetic Oligonucleotide
gcatcctgcggcctctactctgcattcaattacatactgacacattcggcaacatgtttttcctggtttat

SEQ ID NO: 393 - DNA, 71 bp, Artificial Sequence
  Synthetic Oligonucleotide
gaccatcctgcggcctctactctgcattcaattacatactgacacattcggcaacatgtttttcctggttt

SEQ ID NO: 394 - DNA, 71 bp, Artificial Sequence
  Synthetic Oligonucleotide
gaaaccatcctgcggcctctactctgcattcaattacatactgacacattcggcaacatgtttttcctggt

SEQ ID NO: 395 - DNA, 71 bp, Artificial Sequence
  Synthetic Oligonucleotide
gctaaaccatcctgcggcctctactctgcattcaattacatactgacacattcggcaacatgtttttcctg

SEQ ID NO: 396 - DNA, 71 bp, Artificial Sequence
  Synthetic Oligonucleotide
gttctaaaccatcctgcggcctctactctgcattcaattacatactgacacattcggcaacatgtttttcc

SEQ ID NO: 397 - DNA, 71 bp, Artificial Sequence
  Synthetic Oligonucleotide
gtgttctaaaccatcctgcggcctctactctgcattcaattacatactgacacattcggcaacatgttttt

SEQ ID NO: 398 - DNA, 71 bp, Artificial Sequence
  Synthetic Oligonucleotide
gaatgttctaaaccatcctgcggcctctactctgcattcaattacatactgacacattcggcaacatgttt

SEQ ID NO: 399 - DNA, 71 bp, Artificial Sequence
  Synthetic Oligonucleotide
gagaatgttctaaaccatcctgcggcctctactctgcattcaattacatactgacacattcggcaacatgt

SEQ ID NO: 400 - DNA, 71 bp, Artificial Sequence
  Synthetic Oligonucleotide
gatagaatgttctaaaccatcctgcggcctctactctgcattcaattacatactgacacattcggcaacat

SEQ ID NO: 401 - DNA, 71 bp, Artificial Sequence
  Synthetic Oligonucleotide
gccatagaatgttctaaaccatcctgcggcctctactctgcattcaattacatactgacacattcggcaac

SEQ ID NO: 402 - DNA, 71 bp, Artificial Sequence
  Synthetic Oligonucleotide
gttccatagaatgttctaaaccatcctgcggcctctactctgcattcaattacatactgacacattcggca

SEQ ID NO: 403 - DNA, 71 bp, Artificial Sequence
  Synthetic Oligonucleotide
gctttccatagaatgttctaaaccatcctgcggcctctactctgcattcaattacatactgacacattcgg

SEQ ID NO: 404 - DNA, 71 bp, Artificial Sequence
  Synthetic Oligonucleotide
gctctttccatagaatgttctaaaccatcctgcggcctctactctgcattcaattacatactgacacattc

SEQ ID NO: 405 - DNA, 71 bp, Artificial Sequence
  Synthetic Oligonucleotide
gatctctttccatagaatgttctaaaccatcctgcggcctctactctgcattcaattacatactgacacat

SEQ ID NO: 406 - DNA, 71 bp, Artificial Sequence
  Synthetic Oligonucleotide
ggaatctctttccatagaatgttctaaaccatcctgcggcctctactctgcattcaattacatactgacac

SEQ ID NO: 407 - DNA, 71 bp, Artificial Sequence
  Synthetic Oligonucleotide
gtggaatctctttccatagaatgttctaaaccatcctgcggcctctactctgcattcaattacatactgac

SEQ ID NO: 408 - DNA, 71 bp, Artificial Sequence
  Synthetic Oligonucleotide
gactggaatctctttccatagaatgttctaaaccatcctgcggcctctactctgcattcaattacatactg

SEQ ID NO: 409 - DNA, 71 bp, Artificial Sequence
  Synthetic Oligonucleotide
ggaactggaatctctttccatagaatgttctaaaccatcctgcggcctctactctgcattcaattacatac

SEQ ID NO: 410 - DNA, 71 bp, Artificial Sequence
  Synthetic Oligonucleotide
gtggaactggaatctctttccatagaatgttctaaaccatcctgcggcctctactctgcattcaattacat

SEQ ID NO: 411 - DNA, 71 bp, Artificial Sequence
  Synthetic Oligonucleotide
gcctggaactggaatctctttccatagaatgttctaaaccatcctgcggcctctactctgcattcaattac

SEQ ID NO: 412 - DNA, 71 bp, Artificial Sequence
  Synthetic Oligonucleotide
gttcctggaactggaatctctttccatagaatgttctaaaccatcctgcggcctctactctgcattcaatt

SEQ ID NO: 413 - DNA, 71 bp, Artificial Sequence
  Synthetic Oligonucleotide
gggttcctggaactggaatctctttccatagaatgttctaaaccatcctgcggcctctactctgcattcaa

SEQ ID NO: 414 - DNA, 71 bp, Artificial Sequence
  Synthetic Oligonucleotide
gcaggttcctggaactggaatctctttccatagaatgttctaaaccatcctgcggcctctactctgcattc

SEQ ID NO: 415 - DNA, 71 bp, Artificial Sequence
  Synthetic Oligonucleotide
gaccaggttcctggaactggaatctctttccatagaatgttctaaaccatcctgcggcctctactctgcat

SEQ ID NO: 416 - DNA, 71 bp, Artificial Sequence
  Synthetic Oligonucleotide
ggtaccaggttcctggaactggaatctctttccatagaatgttctaaaccatcctgcggcctctactctgc

SEQ ID NO: 417 - DNA, 71 bp, Artificial Sequence
  Synthetic Oligonucleotide
gatgtaccaggttcctggaactggaatctctttccatagaatgttctaaaccatcctgcggcctctactct

SEQ ID NO: 418 - DNA, 71 bp, Artificial Sequence
  Synthetic Oligonucleotide
ggtatgtaccaggttcctggaactggaatctctttccatagaatgttctaaaccatcctgcggcctctact

SEQ ID NO: 419 - DNA, 71 bp, Artificial Sequence
  Synthetic Oligonucleotide
gacgtatgtaccaggttcctggaactggaatctctttccatagaatgttctaaaccatcctgcggcctcta

SEQ ID NO: 420 - DNA, 71 bp, Artificial Sequence
  Synthetic Oligonucleotide
gacacgtatgtaccaggttcctggaactggaatctctttccatagaatgttctaaaccatcctgcggcctc

SEQ ID NO: 421 - DNA, 71 bp, Artificial Sequence
  Synthetic Oligonucleotide
gcaacacgtatgtaccaggttcctggaactggaatctctttccatagaatgttctaaaccatcctgcggcc

SEQ ID NO: 422 - DNA, 71 bp, Artificial Sequence
  Synthetic Oligonucleotide
gcccaacacgtatgtaccaggttcctggaactggaatctctttccatagaatgttctaaaccatcctgcgg

SEQ ID NO: 423 - DNA, 71 bp, Artificial Sequence
  Synthetic Oligonucleotide
ggacccaacacgtatgtaccaggttcctggaactggaatctctttccatagaatgttctaaaccatcctgc

SEQ ID NO: 424 - DNA, 71 bp, Artificial Sequence
  Synthetic Oligonucleotide
gttgacccaacacgtatgtaccaggttcctggaactggaatctctttccatagaatgttctaaaccatcct

SEQ ID NO: 425 - DNA, 71 bp, Artificial Sequence
  Synthetic Oligonucleotide
gccttgacccaacacgtatgtaccaggttcctggaactggaatctctttccatagaatgttctaaaccatc

SEQ ID NO: 426 - DNA, 71 bp, Artificial Sequence
  Synthetic Oligonucleotide
gttccttgacccaacacgtatgtaccaggttcctggaactggaatctctttccatagaatgttctaaacca

SEQ ID NO: 427 - DNA, 85 bp, Artificial Sequence
  Synthetic Oligonucleotide
gcatcctgcggcctctactctgcattcaattacatactgacacattcggcaacatgtttttcctggtttattttcacacagtcca

SEQ ID NO: 428 - DNA, 85 bp, Artificial Sequence
  Synthetic Oligonucleotide
gaccatcctgcggcctctactctgcattcaattacatactgacacattcggcaacatgtttttcctggtttattttcacacagtc

SEQ ID NO: 429 - DNA, 85 bp, Artificial Sequence
  Synthetic Oligonucleotide
gaaaccatcctgcggcctctactctgcattcaattacatactgacacattcggcaacatgtttttcctggtttattttcacacag

SEQ ID NO: 430 - DNA, 85 bp, Artificial Sequence
  Synthetic Oligonucleotide
gctaaaccatcctgcggcctctactctgcattcaattacatactgacacattcggcaacatgtttttcctggtttattttcacac

SEQ ID NO: 431 - DNA, 85 bp, Artificial Sequence
  Synthetic Oligonucleotide
gttctaaaccatcctgcggcctctactctgcattcaattacatactgacacattcggcaacatgtttttcctggtttattttcac

SEQ ID NO: 432 - DNA, 85 bp, Artificial Sequence
  Synthetic Oligonucleotide
gtgttctaaaccatcctgcggcctctactctgcattcaattacatactgacacattcggcaacatgtttttcctggtttattttc

SEQ ID NO: 433 - DNA, 85 bp, Artificial Sequence
  Synthetic Oligonucleotide
gaatgttctaaaccatcctgcggcctctactctgcattcaattacatactgacacattcggcaacatgtttttcctggtttattt

SEQ ID NO: 434 - DNA, 85 bp, Artificial Sequence
  Synthetic Oligonucleotide
gagaatgttctaaaccatcctgcggcctctactctgcattcaattacatactgacacattcggcaacatgtttttcctggtttat

SEQ ID NO: 435 - DNA, 85 bp, Artificial Sequence
  Synthetic Oligonucleotide
gatagaatgttctaaaccatcctgcggcctctactctgcattcaattacatactgacacattcggcaacatgtttttcctggttt

SEQ ID NO: 436 - DNA, 85 bp, Artificial Sequence
  Synthetic Oligonucleotide
gccatagaatgttctaaaccatcctgcggcctctactctgcattcaattacatactgacacattcggcaacatgtttttcctggt

SEQ ID NO: 437 - DNA, 85 bp, Artificial Sequence
  Synthetic Oligonucleotide
gttccatagaatgttctaaaccatcctgcggcctctactctgcattcaattacatactgacacattcggcaacatgtttttcctg

SEQ ID NO: 438 - DNA, 85 bp, Artificial Sequence
  Synthetic Oligonucleotide
gctttccatagaatgttctaaaccatcctgcggcctctactctgcattcaattacatactgacacattcggcaacatgtttttcc

SEQ ID NO: 439 - DNA, 85 bp, Artificial Sequence
  Synthetic Oligonucleotide
gctctttccatagaatgttctaaaccatcctgcggcctctactctgcattcaattacatactgacacattcggcaacatgttttt

SEQ ID NO: 440 - DNA, 85 bp, Artificial Sequence
  Synthetic Oligonucleotide
gatctctttccatagaatgttctaaaccatcctgcggcctctactctgcattcaattacatactgacacattcggcaacatgttt

SEQ ID NO: 441 - DNA, 85 bp, Artificial Sequence
  Synthetic Oligonucleotide
ggaatctctttccatagaatgttctaaaccatcctgcggcctctactctgcattcaattacatactgacacattcggcaacatgt

SEQ ID NO: 442 - DNA, 85 bp, Artificial Sequence
  Synthetic Oligonucleotide
gtggaatctctttccatagaatgttctaaaccatcctgcggcctctactctgcattcaattacatactgacacattcggcaacat

SEQ ID NO: 443 - DNA, 85 bp, Artificial Sequence
  Synthetic Oligonucleotide
gactggaatctctttccatagaatgttctaaaccatcctgcggcctctactctgcattcaattacatactgacacattcggcaac

SEQ ID NO: 444 - DNA, 85 bp, Artificial Sequence
  Synthetic Oligonucleotide
ggaactggaatctctttccatagaatgttctaaaccatcctgcggcctctactctgcattcaattacatactgacacattcggca

SEQ ID NO: 445 - DNA, 85 bp, Artificial Sequence
  Synthetic Oligonucleotide
gtggaactggaatctctttccatagaatgttctaaaccatcctgcggcctctactctgcattcaattacatactgacacattcgg

SEQ ID NO: 446 - DNA, 85 bp, Artificial Sequence
  Synthetic Oligonucleotide
gcctggaactggaatctctttccatagaatgttctaaaccatcctgcggcctctactctgcattcaattacatactgacacattc

SEQ ID NO: 447 - DNA, 85 bp, Artificial Sequence
  Synthetic Oligonucleotide
gttcctggaactggaatctctttccatagaatgttctaaaccatcctgcggcctctactctgcattcaattacatactgacacat

SEQ ID NO: 448 - DNA, 85 bp, Artificial Sequence
  Synthetic Oligonucleotide
gggttcctggaactggaatctctttccatagaatgttctaaaccatcctgcggcctctactctgcattcaattacatactgacac

SEQ ID NO: 449 - DNA, 85 bp, Artificial Sequence
  Synthetic Oligonucleotide
gcaggttcctggaactggaatctctttccatagaatgttctaaaccatcctgcggcctctactctgcattcaattacatactgac

SEQ ID NO: 450 - DNA, 85 bp, Artificial Sequence
  Synthetic Oligonucleotide
gaccaggttcctggaactggaatctctttccatagaatgttctaaaccatcctgcggcctctactctgcattcaattacatactg

SEQ ID NO: 451 - DNA, 85 bp, Artificial Sequence
  Synthetic Oligonucleotide
ggtaccaggttcctggaactggaatctctttccatagaatgttctaaaccatcctgcggcctctactctgcattcaattacatac

SEQ ID NO: 452 - DNA, 85 bp, Artificial Sequence
  Synthetic Oligonucleotide
gatgtaccaggttcctggaactggaatctctttccatagaatgttctaaaccatcctgcggcctctactctgcattcaattacat

SEQ ID NO: 453 - DNA, 85 bp, Artificial Sequence
  Synthetic Oligonucleotide
ggtatgtaccaggttcctggaactggaatctctttccatagaatgttctaaaccatcctgcggcctctactctgcattcaattac

SEQ ID NO: 454 - DNA, 85 bp, Artificial Sequence
  Synthetic Oligonucleotide
gacgtatgtaccaggttcctggaactggaatctctttccatagaatgttctaaaccatcctgcggcctctactctgcattcaatt

SEQ ID NO: 455 - DNA, 85 bp, Artificial Sequence
  Synthetic Oligonucleotide
gacacgtatgtaccaggttcctggaactggaatctctttccatagaatgttctaaaccatcctgcggcctctactctgcattcaa

SEQ ID NO: 456 - DNA, 85 bp, Artificial Sequence
  Synthetic Oligonucleotide
gcaacacgtatgtaccaggttcctggaactggaatctctttccatagaatgttctaaaccatcctgcggcctctactctgcattc

SEQ ID NO: 457 - DNA, 85 bp, Artificial Sequence
  Synthetic Oligonucleotide
gcccaacacgtatgtaccaggttcctggaactggaatctctttccatagaatgttctaaaccatcctgcggcctctactctgcat

SEQ ID NO: 458 - DNA, 85 bp, Artificial Sequence
  Synthetic Oligonucleotide
ggacccaacacgtatgtaccaggttcctggaactggaatctctttccatagaatgttctaaaccatcctgcggcctctactctgc

SEQ ID NO: 459 - DNA, 85 bp, Artificial Sequence
  Synthetic Oligonucleotide
gttgacccaacacgtatgtaccaggttcctggaactggaatctctttccatagaatgttctaaaccatcctgcggcctctactct

SEQ ID NO: 460 - DNA, 85 bp, Artificial Sequence
  Synthetic Oligonucleotide
gccttgacccaacacgtatgtaccaggttcctggaactggaatctctttccatagaatgttctaaaccatcctgcggcctctact

SEQ ID NO: 461 - DNA, 85 bp, Artificial Sequence
  Synthetic Oligonucleotide
gggttccttgacccaacacgtatgtaccaggttcctggaactggaatctctttccatagaatgttctaaaccatcctgcggcctc

SEQ ID NO: 462 - DNA, 85 bp, Artificial Sequence
  Synthetic Oligonucleotide
gttggttccttgacccaacacgtatgtaccaggttcctggaactggaatctctttccatagaatgttctaaaccatcctgcggcc

SEQ ID NO: 463 - DNA, 85 bp, Artificial Sequence
  Synthetic Oligonucleotide
gccttggttccttgacccaacacgtatgtaccaggttcctggaactggaatctctttccatagaatgttctaaaccatcctgcgg

SEQ ID NO: 464 - DNA, 85 bp, Artificial Sequence
  Synthetic Oligonucleotide
ggcccttggttccttgacccaacacgtatgtaccaggttcctggaactggaatctctttccatagaatgttctaaaccatcctgc

SEQ ID NO: 465 - DNA, 85 bp, Artificial Sequence
  Synthetic Oligonucleotide
gccgcccttggttccttgacccaacacgtatgtaccaggttcctggaactggaatctctttccatagaatgttctaaaccatcct

SEQ ID NO: 466 - DNA, 85 bp, Artificial Sequence
  Synthetic Oligonucleotide
gcgccgcccttggttccttgacccaacacgtatgtaccaggttcctggaactggaatctctttccatagaatgttctaaaccatc

SEQ ID NO: 467 - DNA, 85 bp, Artificial Sequence
  Synthetic Oligonucleotide
ggtcgccgcccttggttccttgacccaacacgtatgtaccaggttcctggaactggaatctctttccatagaatgttctaaacca

SEQ ID NO: 468 - DNA, 30 bp, Artificial Sequence
  Synthetic Oligonucleotide
gtaatgcctggcttgtcgacgcatagtctg

SEQ ID NO: 469 - DNA, 51 bp, Artificial Sequence
  Synthetic Oligonucleotide
gaaaacgcaggttcctccagtttcgggagcagcgcacgtctccctgtagtc

SEQ ID NO: 470 - DNA, 51 bp, Artificial Sequence
  Synthetic Oligonucleotide
gacgcaggttcctctagcttcgggagcagcgcacgtctccctgtagtcaag

SEQ ID NO: 471 - DNA, 30 bp, Artificial Sequence; identical to SEQ ID NO: 468
  Synthetic Oligonucleotide

SEQ ID NO: 472 - DNA, 51 bp, Artificial Sequence; identical to SEQ ID NO: 375
  Synthetic Oligonucleotide

SEQ ID NO: 473 - DNA, 30 bp, Artificial Sequence; identical to SEQ ID NO: 468
  Synthetic Oligonucleotide

SEQ ID NO: 474 - DNA, 51 bp, Artificial Sequence
  Synthetic Oligonucleotide
gcaaggccacaaaattatccactgtttttggaacagtctttccgaagagac

SEQ ID NO: 475 - DNA, 51 bp, Artificial Sequence
  Synthetic Oligonucleotide
gcctgtagccaaggccacaaaattatccactgtttttggaacagtctttcc

SEQ ID NO: 476 - DNA, 51 bp, Artificial Sequence
  Synthetic Oligonucleotide
gctttctctcctgtagccaaggccacaaaattatccactgtttttggaaca

SEQ ID NO: 477 - DNA, 51 bp, Artificial Sequence
  Synthetic Oligonucleotide
ggccaaatcctttctctcctgtagccaaggccacaaaattatccactgttt

SEQ ID NO: 478 - DNA, 51 bp, Artificial Sequence
  Synthetic Oligonucleotide
gtttttgtagccaaatcctttctctcctgtagccaaggccacaaaattatc

SEQ ID NO: 479 - DNA, 51 bp, Artificial Sequence
  Synthetic Oligonucleotide
gatttgctgtttttgtagccaaatcctttctctcctgtagccaaggccaca

SEQ ID NO: 480 - DNA, 51 bp, Artificial Sequence
  Synthetic Oligonucleotide
gacgatggaatttgctgtttttgtagccaaatcctttctctcctgtagcca

SEQ ID NO: 481 - DNA, 51 bp, Artificial Sequence
  Synthetic Oligonucleotide
gatagaatgttctaaacgatcctgcggcctctactctgcattcaattacat

SEQ ID NO: 482 - DNA, 51 bp, Artificial Sequence
  Synthetic Oligonucleotide
gatagaatgttctaaacaatcctgcggcctctactctgcattcaattacat

SEQ ID NO: 483 - DNA, 51 bp, Artificial Sequence
  Synthetic Oligonucleotide
gatagaatgttctaaactatcctgcggcctctactctgcattcaattacat

SEQ ID NO: 484 - DNA, 51 bp, Artificial Sequence
  Synthetic Oligonucleotide
ggtcccacgcggcccacagctgcaccaggaagaagggtgcccagcacagca

SEQ ID NO: 485 - DNA, 51 bp, Artificial Sequence
  Synthetic Oligonucleotide
ggggtcccacgcggcccacagctgcaccaggaagaagggtgcccagcacag

SEQ ID NO: 486 - DNA, 51 bp, Artificial Sequence
  Synthetic Oligonucleotide
gccgggtcccacgcggcccacagctgcaccaggaagaagggtgcccagcac

SEQ ID NO: 487 - DNA, 51 bp, Artificial Sequence
  Synthetic Oligonucleotide
gggtgatgacatcccaggcgatcgtgtggcctccaggagcccagagcagga

SEQ ID NO: 488 - DNA, 51 bp, Artificial Sequence
  Synthetic Oligonucleotide
gagggtgatgacatcccaggcgatcgtgtggcctccaggagcccagagcag

SEQ ID NO: 489 - DNA, 51 bp, Artificial Sequence
  Synthetic Oligonucleotide
gatcagggtgatgacatcccaggcgatcgtgtggcctccaggagcccagag

SEQ ID NO: 490 - DNA, 51 bp, Artificial Sequence
  Synthetic Oligonucleotide
ggtggctccattcactccaatgctgagcacttccacagagtgggttaaagc

SEQ ID NO: 491 - DNA, 51 bp, Artificial Sequence
  Synthetic Oligonucleotide
gtttctaatatattttgccagactgatggactattctcaattaataatgat

SEQ ID NO: 492 - DNA, 51 bp, Artificial Sequence
  Synthetic Oligonucleotide
gagatgttgctgtggatccagtccacagccagcccgtcgggggcctggatg

SEQ ID NO: 493 - DNA, 51 bp, Artificial Sequence
  Synthetic Oligonucleotide
gcaggccggcccagctgccaggtgcacctgctcggagcatcgggccggatc

SEQ ID NO: 494 - DNA, 51 bp, Artificial Sequence
  Synthetic Oligonucleotide
gcaaagaacctctgggtccaagggtagaccaccagcagcctgcccagggcc

SEQ ID NO: 495 - DNA, 51 bp, Artificial Sequence
  Synthetic Oligonucleotide
gaagagaaacttagtttccagggctttggtagagggcaaaggttgatagca

SEQ ID NO: 496 - DNA, 51 bp, Artificial Sequence
  Synthetic Oligonucleotide
gtcagcctagtgcagagccactggtagttggtggttagagtttcaagttcc

SEQ ID NO: 497 - DNA, 51 bp, Artificial Sequence
  Synthetic Oligonucleotide
ggctcattgtgaacaggccagtaatgtccgggatggggcggcataggcggg

SEQ ID NO: 498 - DNA, 51 bp, Artificial Sequence
  Synthetic Oligonucleotide
gtagctaaagaacttgaccaagacatatcaggatccacctcagctcctaga

SEQ ID NO: 499 - DNA, 51 bp, Artificial Sequence
  Synthetic Oligonucleotide
ggggcattgttctgtgcccagtcctgctggtagacctgctccccggtggct

SEQ ID NO: 500 - DNA, 51 bp, Artificial Sequence
  Synthetic Oligonucleotide
gagaagtcgttcatgtgccaccgtgggagcgtacagtcatcattgatcttg

SEQ ID NO: 501 - skipped

SEQ ID NO: 502 - DNA, 51 bp, Artificial Sequence
  Synthetic Oligonucleotide
gatgaatgaacgatttcccagaactccctaatcagaacagagtccctggta

SEQ ID NO: 503 - DNA, 51 bp, Artificial Sequence
  Synthetic Oligonucleotide
ggagcctctgccggagcccagagaacccgagagtcagacagagccagcgcc

SEQ ID NO: 504 - DNA, 51 bp, Artificial Sequence
  Synthetic Oligonucleotide
ggcttccgtggagacacccaatcaatttgaagagatcttgaagtgatgcca

SEQ ID NO: 505 - DNA, 51 bp, Artificial Sequence
  Synthetic Oligonucleotide
gtgggactgccctcctcccatttgcagatgccgtcgtagaatcgcagcagg

SEQ ID NO: 506 - DNA, 51 bp, Artificial Sequence
  Synthetic Oligonucleotide
gcttcttcaatagttctccagctacactggcaggcatatgcccgtgttcct

SEQ ID NO: 507 - DNA, 51 bp, Artificial Sequence
  Synthetic Oligonucleotide
gattccttttcttcgtcccaattcacctcagtggctagtcgaagaatgaag

SEQ ID NO: 508 - DNA, 51 bp, Artificial Sequence
  Synthetic Oligonucleotide
gcagcttcagcaccttccagtcagactcctgcttcaagcactgcagcagga

SEQ ID NO: 509 - DNA, 51 bp, Artificial Sequence
  Synthetic Oligonucleotide
gccatttgcttgcagtgccactccagaggattccggattgccataaatact

SEQ ID NO: 510 - DNA, 51 bp, Artificial Sequence
  Synthetic Oligonucleotide
gttcaatagttttggtccagtatcgtttacagcccttcttggtagatttca

SEQ ID NO: 511 - DNA, 51 bp, Artificial Sequence
  Synthetic Oligonucleotide
ggcaaccgtcttctgaccaaatggcagaacatttgtccccaactttccact

SEQ ID NO: 512 - DNA, 51 bp, Artificial Sequence
  Synthetic Oligonucleotide
gcgactttccaatgaaccactgaagcccaggtatgacaaagccgatgatct

SEQ ID NO: 513 - DNA, 51 bp, Artificial Sequence
  Synthetic Oligonucleotide
gtttacactcatgcttccacagctttaacagatcatttggttccttgatga

SEQ ID NO: 514 - DNA, 51 bp, Artificial Sequence
  Synthetic Oligonucleotide
gcttaagcttccgtgtccagccttcaggcagggtggggtcatcatacatgg

SEQ ID NO: 515 - DNA, 51 bp, Artificial Sequence
  Synthetic Oligonucleotide
ggacagctgggctgatccatgatgtcatccagaaacactggggaccctcag

SEQ ID NO: 516 - DNA, 51 bp, Artificial Sequence
  Synthetic Oligonucleotide
gtctcatctcaactttccatatccgtatcatggaatcatagcatcctgtaa

SEQ ID NO: 517 - DNA, 51 bp, Artificial Sequence
  Synthetic Oligonucleotide
gcatgcagacgcggttccactcgcagccacagttccagcaccactcgagcc

SEQ ID NO: 518 - DNA, 51 bp, Artificial Sequence
  Synthetic Oligonucleotide
gttggttagggtcaacccagtattctccactcttgagttcaggatggcaga

SEQ ID NO: 519 - DNA, 51 bp, Artificial Sequence
  Synthetic Oligonucleotide
gctacactgtccaacacccactctcgggtcaccacaggtgcctcacacatc

SEQ ID NO: 520 - DNA, 51 bp, Artificial Sequence
  Synthetic Oligonucleotide
gctgcactgtgtacccccagagctccgtgttgccgacatcctggggtggct

SEQ ID NO: 521 - DNA, 51 bp, Artificial Sequence
  Synthetic Oligonucleotide
gagcttcctgccactcccaacaggtttcacagtaagcgcgtatctgttcca

SEQ ID NO: 522 - DNA, 51 bp, Artificial Sequence
  Synthetic Oligonucleotide
gacggcaagagcttacccagtcacttgtgtggagacttaaatacttgcata

SEQ ID NO: 523 - DNA, 51 bp, Artificial Sequence; identical to SEQ ID NO: 474
  Synthetic Oligonucleotide

SEQ ID NO: 524 - DNA, 51 bp, Artificial Sequence; identical to SEQ ID NO: 475
  Synthetic Oligonucleotide

SEQ ID NO: 525 - DNA, 51 bp, Artificial Sequence; identical to SEQ ID NO: 476
  Synthetic Oligonucleotide

SEQ ID NO: 526 - DNA, 51 bp, Artificial Sequence; identical to SEQ ID NO: 477
  Synthetic Oligonucleotide

SEQ ID NO: 527 - DNA, 51 bp, Artificial Sequence; identical to SEQ ID NO: 478
  Synthetic Oligonucleotide

SEQ ID NO: 528 - DNA, 51 bp, Artificial Sequence; identical to SEQ ID NO: 479
  Synthetic Oligonucleotide

SEQ ID NO: 529 - DNA, 51 bp, Artificial Sequence; identical to SEQ ID NO: 480
  Synthetic Oligonucleotide

SEQ ID NO: 530 - DNA, 30 bp, Artificial Sequence; identical to SEQ ID NO: 468
  Synthetic Oligonucleotide

SEQ ID NO: 531 - DNA, 51 bp, Artificial Sequence; identical to SEQ ID NO: 375
  Synthetic Oligonucleotide

SEQ ID NO: 532 - DNA, 34 bp, Artificial Sequence
  Synthetic Oligonucleotide
gcagggttttcccagtcacgacgttgtaaagttg

SEQ ID NO: 533 - DNA, 51 bp, Artificial Sequence
  Synthetic Oligonucleotide
gtcaaggcactcttgcccacgccaccagctccaactaccacaagtttatat

SEQ ID NO: 534 - DNA, 51 bp, Artificial Sequence
  Synthetic Oligonucleotide
gcaaagatcacccggcccacatcttcatctccaattcgtaggtcaaaatac

SEQ ID NO: 535 - DNA, 51 bp, Artificial Sequence
  Synthetic Oligonucleotide
gcgccaccagctccaaccaccacaagtttatattcagtcattttcagcagg

SEQ ID NO: 536 - DNA, 51 bp, Artificial Sequence
  Synthetic Oligonucleotide
gtttctccatcaattaccacttgcttcctgtaggaatcctctattgttgga

SEQ ID NO: 537 - DNA, 51 bp, Artificial Sequence; identical to SEQ ID NO: 476
  Synthetic Oligonucleotide

SEQ ID NO: 538 - DNA, 30 bp, Artificial Sequence; identical to SEQ ID NO: 468
  Synthetic Oligonucleotide

SEQ ID NO: 539 - DNA, 83 bp, Artificial Sequence
  Synthetic Oligonucleotide
tctttccataggccctgaaaaagggcctgttctaaaccatcctgcggcctctactcggccctgaaaaagggccattcaattac

SEQ ID NO: 540 - DNA, 83 bp, Artificial Sequence
  Synthetic Oligonucleotide
cagctggcgaggccctgaaaaagggccggggatgtgccgcaaggcgattaagttggggccctgaaaaagggccacgccagggt

SEQ ID NO: 541 - DNA, 79 bp, Artificial Sequence
  Synthetic Oligonucleotide
gtggaatagtataacaatatgctaaatgttgttatagtatcccactctaaaccatcctgcggggccctcttcagggccc

SEQ ID NO: 542 - DNA, 79 bp, Artificial Sequence
  Synthetic Oligonucleotide
gtggaatagtataacaatatgctaaatgttgttatagtatcccacaccctggcgttacccagggccctcttcagggccc

SEQ ID NO: 543 - RNA, 27 nt, Artificial Sequence
  Synthetic Oligonucleotide
  misc_feature (1)..(4): n is a, c, g, or u
  misc_feature (13)..(16): n is a, c, g, or u
nnnngacuacagnnnnucccgaaaugg

SEQ ID NO: 544 - RNA, 28 nt, Artificial Sequence
  Synthetic Oligonucleotide
  misc_feature (1)..(4): n is a, c, g, or u
  misc_feature (13)..(16): n is a, c, g, or u
nnnngacuacagnnnnucccgaaacuag

SEQ ID NO: 545 - DNA, 85 bp, Artificial Sequence
  Synthetic Oligonucleotide
gttccttgacccaacacgtatgtaccaggttcctggaactggaatctctttccatagaatgttctaaaccatcctgcggcctcta

SEQ ID NO: 546 - DNA, 51 bp, Artificial Sequence
  Synthetic Oligonucleotide
gggattaatgctgaacgcaccaaagttcatcccaccacccatattactacc

SEQ ID NO: 547 - protein, 1154 aa, Paludibacter propionicigenes
MKTSANNIYFNGINSFKKIFDSKGAIAPIAEKSCRNFDIKAQNDVNKEQRIHYFAVGHTFKQLDTENLFEYVLDENLRAKRPTRFISLQQFDKEFIENIKRLISDIRNINSHYIHRFDPLKIDAVPTNIIDFLKESFELAVIQIYLKEKGINYLQFSENPHADQKLVAFLHDKFLPLDEKKTSMLQNETPQLKEYKEYRKYFKTLSKQAAIDQLLFAEKETDYIWNLFDSHPVLTISAGKYLSFYSCLFLLSMFLYKSEANQLISKIKGFKKNTTEEEKSKREIFTFFSKRFNSMDIDSEENQLVKFRDLILYLNHYPVAWNKDLELDSSNPAMTDKLKSKIIELEINRSFPLYEGNERFATFAKYQIWGKKHLGKSIEKEYINASFTDEEITAYTYETDTCPELKDAHKKLADLKAAKGLFGKRKEKNESDIKKTETSIRELQHEPNPIKDKLIQRIEKNLLTVSYGRNQDRFMDFSARFLAEINYFGQDASFKMYHFYATDEQNSELEKYELPKDKKKYDSLKFHQGKLVHFISYKEHLKRYESWDDAFVIENNAIQLKLSFDGVENTVTIQRALLIYLLEDALRNIQNNTAENAGKQLLQEYYSHNKADLSAFKQILTQQDSIEPQQKTEFKKLLPRRLLNNYSPAINHLQTPHSSLPLILEKALLAEKRYCSLVVKAKAEGNYDDFIKRNKGKQFKLQFIRKAWNLMYFRNSYLQNVQAAGHHKSFHIERDEFNDFSRYMFAFEELSQYKYYLNEMFEKKGFFENNEFKILFQSGTSLENLYEKTKQKFEIWLASNTAKTNKPDNYHLNNYEQQFSNQLFFINLSHFINYLKSTGKLQTDANGQIIYEALNNVQYLIPEYYYTDKPERSESKSGNKLYNKLKATKLEDALLYEMAMCYLKADKQIADKAKHPITKLLTSDVEFNITNKEGIQLYHLLVPFKKIDAFIGLKMHKEQQDKKHPTSFLANIVNYLELVKNDKDIRKTYEAFSTNPVKRTLTYDDLAKIDGHLISKSIKFTNVTLELERYFIFKESLIVKKGNNIDFKYIKGLRNYYNNEKKKNEGIRNKAFHFGIPDSKSYDQLIRDAEVMFIANEVKPTHATKYTDLNKQLHTVCDKLMETVHNDYFSKEGDGKKKREAAGQKYFENIISAK

SEQ ID NO: 548 - protein, 1090 aa, Prevotella sp.
MNIPALVENQKKYFGTYSVMAMLNAQTVLDHIQKVADIEGEQNENNENLWFHPVMSHLYNAKNGYDKQPEKTMFIIERLQSYFPFLKIMAENQREYSNGKYKQNRVEVNSNDIFEVLKRAFGVLKMYRDLTNHYKTYEEKLIDGCEFLTSTEQPFSGMISKYYTVALRNTKERYGYKAEDLAFIQDNRYKFTKDAYGKRKSQVNTGSFLSLQDYNGDTTKKLHLSGVGIALLICLFLDKQYINLFLSRLPIFSSYNAQSEERRIIIRSFGINSIKQPKDRIHSEKSNKSVAMDMLNEVKRCPDELFTTLSAEKQSRFRIISDDHNEVLMKRSSDRFVPLLLQYIDYGKLFDHIRFHVNMGKLRYLLKADKTCIDGQTRVRVIEQPLNGFGRLEEVETMRKQENGTFGNSGIRIRDFENMKRDDANPANYPYIVETYTHYILENNKVEMFISDEENPTPLLPVIEDDRYVVKTIPSCRMSTLEIPAMAFHMFLFGSEKTEKLIIDVHDRYKRLFQAMQKEEVTAENIASFGIAESDLPQKIMDLISGNAHGKDVDAFIRLTVDDMLTDTERRIKRFKDDRKSIRSADNKMGKRGFKQISTGKLADFLAKDIVLFQPSVNDGENKITGLNYRIMQSAIAVYDSGDDYEAKQQFKLMFEKARLIGKGTTEPHPFLYKVFVRSIPANAVDFYERYLIERKFYLIGLSNEIKKGNRVDVPFIRRDQNKWKTPAMKTLGRIYSEDLPVELPRQMFDNEIKSHLKSLPQMEGIDFNNANVTYLIAEYMKRVLNDDFQTFYQWKRNYRYMDMLRGEYDRKGSLQHCFTSIEEREGLWKERASRTERYRKLASNKIRSNRQMRNASSEEIETILDKRLSNCRNEYQKSEKIIRRYRVQDALLFLLAKKTLTELADFDGERFKLKEIMPDAEKGILSEIMPMSFTFEKGGKIYTITSGGMKLKNYGDFFVLASDKRIGNLLELVGSNTVSKEDIMEEFKKYDQCRPEISSIVFNLEKWAFDTYPELPARVDRKEKVDFWSILDVLSNNKDINNEQSYILRKIRNAFDHNNYPDKGIVEIKALPEIAMSIKKAFGEYAIMK

SEQ ID NO: 549 - protein, 1090 aa, Prevotella sp.
MNIPALVENQKKYFGTYSVMAMLNAQTVLDHIQKVADIEGEQNENNENLWFHPVMSHLYNAKNGYDKQPEKTMFIIERLQSYFPFLKIMAENQREYSNGKYKQNRVEVNSNDIFEVLKRAFGVLKMYRDQASHYKTYDEKLIDGCEFLTSTEQPLSGMINNYYTVALRNMNERYGYKTEDLAFIQDKRFKFVKDAYGKKKSQVNTGFFLSLQDYNGDTQKKLHLSGVGIALLICLFLDKQYINIFLSRLPIFSSYNAQSEERRIIIRSFGINSIKQPKDRIHSEKSNKSVAMDMLNEIKRCPNELFETLSAEKQSRFRIISNDHNEVLMKRSSDRFVPLLLQYIDYGKLFDHIRFHVNMGKLRYLLKADKTCIDGQTRVRVIEQPLNGFGRLEEVETMRKQENGTFGNSGIRIRDFENMKRDDANPANYPYIVDTYTHYILENNKVEMFISDEETPAPLLPVIEDDRYVVKTIPSCRMSTLEIPAMAFHMFLFGSKKTEKLIVDVHNRYKRLFKAMQKEEVTAENIASFGIAESDLPQKIIDLISGNAHGKDVDAFIRLTVDDMLADTERRIKRFKDDRKSIRSADNKMGKRGFKQISTGKLADFLAKDIVLFQPSVNDGENKITGLNYRIMQSAIAVYNSGDDYEAKQQFKLMFEKARLIGKGTTEPHPFLYKVFVRSIPANAVDFYERYLIERKFYLIGLSNEIKKGNRVDVPFIRRDQNKWKTPAMKTLGRIYDEDLPVELPRQMFDNEIKSHLKSLPQMEGIDFNNANVTYLIAEYMKRVLNDDFQTFYQWKRNYRYMDMLRGEYDRKGSLQSCFTSVEEREGLWKERASRTERYRKLASNKIRSNRQMRNASSEEIETILDKRLSNSRNEYQKSEKVIRRYRVQDALLFLLAKKTLTELADFDGERFKLKEIMPDAEKGILSEIMPMSFTFEKGGKKYTITSEGMKLKNYGDFFVLASDKRIGNLLELVGSDTVSKEDIMEEFKKYDQCRPEISSIVFNLEKWAFDTYPELSARVDREEKVDFKSILKILLNNKNINKEQSDILRKIRNAFDHNNYPDKGVVEIRALPEIAMSIKKAFGEYAIMK

SEQ ID NO: 550 - protein, 1090 aa, Prevotella sp.; identical to SEQ ID NO: 160

SEQ ID NO: 551 - protein, 1090 aa, Prevotella sp.
MNIPALVENQKKYFGTYSVMAMLNAQTVLDHIQKVADIEGEQNENNENLWFHPVMSHLYNAKNGYDKQPEKTMFIIERLQSYFPFLKIMAENQREYSNGKYKQNRVEVNSNDIFEVLKRAFGVLKMYRDLTNHYKTYEEKLIDGCEFLTSTEQPLSGMISKYYTVALRNTKERYGYKTEDLAFIQDNIKKITKDAYGKRKSQVNTGFFLSLQDYNGDTQKKLHLSGVGIALLICLFLDKQYINIFLSRLPIFSSYNAQSEERRIIIRSFGINSIKLPKDRIHSEKSNKSVAMDMLNEVKRCPDELFTTLSAEKQSRFRIISDDHNEVLMKRSTDRFVPLLLQYIDYGKLFDHIRFHVNMGKLRYLLKADKTCIDGQTRVRVIEQPLNGFGRLEEAETMRKQENGTFGNSGIRIRDFENVKRDDANPANYPYIVDTYTHYILENNKVEMFISDKGSSAPLLPLIEDDRYVVKTIPSCRMSTLEIPAMAFHMFLFGSKKTEKLIVDVHNRYKRLFQAMQKEEVTAENIASFGIAESDLPQKILDLISGNAHGKDVDAFIRLTVDDMLTDTERRIKRFKDDRKSIRSADNKMGKRGFKQISTGKLADFLAKDIVLFQPSVNDGENKITGLNYRIMQSAIAVYDSGDDYEAKQQFKLMFEKARLIGKGTTEPHPFLYKVFARSIPANAVDFYERYLIERKFYLTGLCNEIKRGNRVDVPFIRRDQNKWKTPAMKTLGRIYSEDLPVELPRQMFDNEIKSHLKSLPQMEGIDFNNANVTYLIAEYMKRVLNDDFQTFYQWKRNYHYMDMLKGEYDRKGSLQHCFTSVEEREGLWKERASRTERYRKLASNKIRSNRQMRNASSEEIETILDKRLSNCRNEYQKSEKVIRRYRVQDALLFLLAKKTLTELADFDGERFKLKEIMPDAEKGILSEIMPMSFTFEKGGKKYTITSEGMKLKNYGDFFVLASDKRIGNLLELVGSDIVSKEDIMEEFNKYDQCRPEISSIVFNLEKWAFDTYPELSARVDREEKVDFKSILKILLNNKNINKEQSDILRKIRNAFDHNNYPDKGIVEIKALPEIAMSIKKAFGEYAIMK

SEQ ID NO: 552 - protein, 1199 aa, Capnocytophaga canimorsus; identical to SEQ ID NO: 158

SEQ ID NO: 553 - protein, 1131 aa, Phaeodactylibacter xiamenensis
MTNTPKRRTLHRHPSYFGAFLNIARHNAFMIMEHLSTKYDMEDKNTLDEAQLPNAKLFGCLKKRYGKPDVTEGVSRDLRRYFPFLNYPLFLHLEKQQNAEQAATYDINPEDIEFTLKGFFRLLNQMRNNYSHYISNTDYGKFDKLPVQDIYEAAIFRLLDRGKHTKRFDVFESKHTRHLESNNSEYRPRSLANSPDHENTVAFVTCLFLERKYAFPFLSRLDCFRSTNDAAEGDPLIRKASHECYTMFCCRLPQPKLESSDILLDMVNELGRCPSALYNLLSEEDQARFHIKREEITGFEEDPDEELEQEIVLKRHSDRFPYFALRYFDDTEAFQTLRFDVYLGRWRTKPVYKKRIYGQERDRVLTQSIRTFTRLSRLLPIYENVKHDAVRQNEEDGKLVNPDVTSQFHKSWIQIESDDRAFLSDRIEHFSPHYNFGDQVIGLKFINPDRYAAIQNVFPKLPGEEKKDKDAKLVNETADAIISTHEIRSLFLYHYLSKKPISAGDERRFIQVDTETFIKQYIDTIKLFFEDIKSGELQPIADPPNYQKNEPLPYVRGDKEKTQEERAQYRERQKEIKERRKELNTLLQNRYGLSIQYIPSRLREYLLGYKKVPYEKLALQKLRAQRKEVKKRIKDIEKMRTPRVGEQATWLAEDIVFLTPPKMHTPERKTTKHPQKLNNDQFRIMQSSLAYFSVNKKAIKKFFQKETGIGLSNRETSHPFLYRIDVGRCRGILDFYTGYLKYKMDWLDDAIKKVDNRKHGKKEAKKYEKYLPSSIQHKTPLELDYTRLPVYLPRGLFKKAIVKALAAHADFQVEPEEDNVIFCLDQLLDGDTQDFYNWQRYYRSALTEKETDNQLVLAHPYAEQILGTIKTLEGKQKNNKLGNKAKQKIKDELIDLKRAKRRLLDREQYLRAVQAEDRALWLMIQERQKQKAEHEEIAFDQLDLKNITKILTESIDARLRIPDTKVDITDKLPLRRYGDLRRVAKDRRLVNLASYYHVAGLSEIPYDLVKKELEEYDRRRVAFFEHVYQFEKEVYDRYAAELRNENPKGESTYFSHWEYVAVAVKHSADTHFNELFKEKVMQLRNKFHHNEFPYFDWLLPEVEKASAALYADRVFDVAEGYYQKMRKLMRQ

SEQ ID NO: 554 - protein, 1135 aa, Porphyromonas gingivalis
MNTVPASENKGQSRTVEDDPQYFGLYLNLARENLIEVESHVRIKFGKKKLNEESLKQSLLCDHLLSVDRWTKVYGHSRRYLPFLHYFDPDSQIEKDHDSKTGVDPDSAQRLIRELYSLLDFLRNDFSHNRLDGTTFEHLEVSPDISSFITGTYSLACGRAQSRFADFFKPDDFVLAKNRKEQLISVADGKECLTVSGLAFFICLFLDREQASGMLSRIRGFKRTDENWARAVHETFCDLCIRHPHDRLESSNTKEALLLDMLNELNRCPRILYDMLPEEERAQFLPALDENSMNNLSENSLNEESRLLWDGSSDWAEALTKRIRHQDRFPYLMLRFIEEMDLLKGIRFRVDLGEIELDSYSKKVGRNGEYDRTITDHALAFGKLSDFQNEEEVSRMISGEASYPVRFSLFAPRYAIYDNKIGYCHTSDPVYPKSKTGEKRALSNPQSMGFISVHNLRKLLLMELLCEGSFSRMQSDFLRKANRILDETAEGKLQFSALFPEMRHRFIPPQNPKSKDRREKAETTLEKYKQEIKGRKDKLNSQLLSAFDMNQRQLPSRLLDEWMNIRPASHSVKLRTYVKQLNEDCRLRLRKFRKDGDGKARAIPLVGEMATFLSQDIVRMIISEETKKLITSAYYNEMQRSLAQYAGEENRRQFRAIVAELHLLDPSSGHPFLSATMETAHRYTEDFYKCYLEKKREWLAKTFYRPEQDENTKRRISVFFVPDGEARKLLPLLIRRRMKEQNDLQDWIRNKQAHPIDLPSHLFDSKIMELLKVKDGKKKWNEAFKDWWSTKYPDGMQPFYGLRRELNIHGKSVSYIPSDGKKFADCYTHLMEKTVQDKKRELRTAGKPVPPDLAADIKRSFHRAVNEREFMLRLVQEDDRLMLMAINKMMTDREEDILPGLKNIDSILDEENQFSLAVHAKVLEKEGEGGDNSLSLVPATIEIKSKRKDWSKYIRYRYDRRVPGLMSHFPEHKATLDEVKTLLGEYDRCRIKIFDWAFALEGAIMSDRDLKPYLHESSSREGKSGEHSTLVKMLVEKKGCLTPDESQYLILIRNKAAHNQFPCAAEMPLIYRDVSAKVGSIEGSSAKDLPEGSSLVDSLWKKYEMIIRKILPILDPENRFFGKLLNNMSQPINDL

SEQ ID NO: 555 - protein, 1135 aa, Porphyromonas gingivalis
MNTVPASENKGQSRTVEDDPQYFGLYLNLARENLIEVESHVRIKFGKKKLNEESLKQSLLCDHLLSVDRWTKVYGHSRRYLPFLHYFDPDSQIEKDHDSKTGVDPDSAQRLIRELYSLLDFLRNDFSHNRLDGTTFEHLEVSPDISSFITGTYSLACGRAQSRFADFFKPDDFVLAKNRKEQLISVADGKECLTVSGLAFFICLFLDREQASGMLSRIRGFKRTNENWARAVHETFCDLCIRHPHDRLESSNTKEALLLDMLNELNRCPRILYDMLPEEERAQFLPALDENSMNNLSENSLNEESRLLWDGSSDWAEALTKRIRHQDRFPYLMLRFIEEMDLLKGIRFRVDLGEIELDSYSKKVGRNGEYDRTITDHALAFGKLSDFQNEEEVSRMISGEASYPVRFSLFAPRYAIYDNKIGYCHTSDPVYPKSKTGEKRALSNPQSMGFISVHDLRKLLLMELLCEGSFSRMQSGFLRKANRILDETAEGKLQFSALFPEMRHRFIPPQNPKSKDRREKAETTLEKYKQEIKGRKDKLNSQLLSAFDMNQRQLPSRLLDEWMNIRPASHSVKLRTYVKQLNEDCRLRLRKFRKDGDGKARAIPLVGEMATFLSQDIVRMIISEETKKLITSAYYNEMQRSLAQYAGEENRRQFRAIVAELHLLDPSSGHPFLSATMETAHRYTEDFYKCYLEKKREWLAKTFYRPEQDENTKRRISVFFVPDGEARKLLPLLIRRRMKEQNDLQDWIRNKQAHPIDLPSHLFDSKIMELLKVKDGKKKWNEAFKDWWSTKYPDGMQPFYGLRRELNIHGKSVSYIPSDGKKFADCYTHLMEKTVQDKKRELRTAGKPVPPDLAADIKRSFHRAVNEREFMLRLVQEDDRLMLMAINKMMTDREEDILPGLKNIDSILDKENQFSLAVHAKVLEKEGEGGDNSLSLVPATIEIKSKRKDWSKYIRYRYDRRVPGLMSHFPEHKATLDEVKTLLGEYDRCRIKIFDWAFALEGAIMSDRDLKPYLHESSSREGKSGEHSTLVKMLVEKKGCLTPDESQYLILIRNKAAHNQFPCAAEMPLIYRDVSAKVGSIEGSSAKDLPEGSSLVDSLWKKYEMIIRKILPILDHENRFFGKLLNNMSQPINDL

SEQ ID NO: 556 - protein, 1135 aa, Porphyromonas gingivalis; identical to SEQ ID NO: 149

SEQ ID NO: 557 - protein, 1135 aa, Porphyromonas gingivalis
MNTVPASENKGQSRTVEDDPQYFGLYLNLARENLIEVESHVRIKFGKKKLNEESLKQSLLCDHLLSVDRWTKVYGHSRRYLPFLHYFDPDSQIEKDHDSKTGVDPDSAQRLIRELYSLLDFLRNDFSHNRLDGTTFEHLEVSPDISSFITGTYSLACGRAQSRFADFFKPDDFVLAKNRKEQLISVADGKECLTVSGLAFFICLFLDREQASGMLSRIRGFKRTDENWARAVHETFCDLCIRHPHDRLESSNTKEALLLDMLNELNRCPRILYDMLPEEERAQFLPALDENSMNNLSENSLNEESRLLWDGSSDWAEALTKRIRHQDRFPYLMLRFIEEMDLLKGIRFRVDLGEIELDSYSKKVGRNGEYDRTITDHALAFGKLSDFQNEEEVSRMISGEASYPVRFSLFAPRYAIYDNKIGYCHTSDPVYPKSKTGEKRALSNPQSMGFISVHDLRKLLLMELLCEGSFSRMQSGFLRKANRILDETAEGKLQFSALFPEMRHRFIPPQNPKSKDRREKAETTLEKYKQEIKGRKDKLNSQLLSAFDMNQRQLPSRLLDEWMNIRPASHSVKLRTYVKQLNEDCRLRLRKFRKDGDGKARAIPLVGEMATFLSQDIVRMIISEETKKLITSAYYNEMQRSLAQYAGEENRRQFRAIVAELHLLDPSSGHPFLSATMETAHRYTEDFYKCYLEKKREWLAKTFYRPEQDENTKRRISVFFVPDGEARKLLPLLIRRRMKEQNDLQDWIRNKQAHPIDLPSHLFDSKIMELLKVKDGKKKWNEAFKDWWSTKYPDGMQPFYGLRRELNIHGKSVSYIPSDGKKFADCYTHLMEKTVQDKKRELRTAGKPVPPDLAADIKRSFHRAVNEREFMLRLVQEDDRLMLMAINKMMTDREEDILPGLKNIDSILDEENQFSLAVHAKVLEKEGEGGDNSLSLVPATIEIKSKRKDWSKYIRYRYDRRVPGLMSHFPEHKATLDEVKTLLGEYDRCRIKIFDWAFALEGAIMSDRDLKPYLHESSSREGKSGEHSTLVKMLVEKKGCLTPDESQYLILIRNKAAHNQFPCAAEMPLIYRDVSAKVGSIEGSSAKDLPEGSSLVDSLWKKYEMIIRKILPILDHENRFFGKLLNNMSQPINDL

SEQ ID NO: 558 - protein, 1135 aa, Porphyromonas gingivalis; identical to SEQ ID NO: 557

SEQ ID NO: 559 - protein, 1135 aa, Porphyromonas gingivalis
MNTVPASENKGQSRTVEDDPQYFGLYLNLARENLIEVESHVRIKFGKKKLNEESLKQSLLCDHLLSVDRWTKVYGHSRRYLPFLHYFDPDSQIEKDHDSKTGVDPDSAQRLIRELYSLLDFLRNDFSHNRLDGTTFEHLEVSPDISSFITGTYSLACGRAQSRFADFFKPDDFVLAKNRKEQLISVADGKECLTVSGLAFFICLFLDREQASGMLSRIRGFKRTDENWARAVHETFCDLCIRHPHDRLESSNTKEALLLDMLNELNRCPRILYDMLPEEERAQFLPALDENSMNNLSENSLNEESRLLWDGSSDWAEALTKRIRHQDRFPYLMLRFIEEMDLLKGIRFRVDLGEIELDSYSKKVGRNGEYDRTITDHALAFGKLSDFQNEEEVSRMISGEASYPVRFSLFAPRYAIYDNKIGYCHTSDPVYPKSKTGEKRALSNPRSMGFISVHDLRKLLLMELLCEGSFSRMQSDFLRKANRILDETAEGKLQFSALFPEMRHRFIPPQNPKSKDRREKAETTLEKYKQEIKGRKDKLNSQLLSAFDMNQRQLPSRLLDEWMNIRPASHSVKLRTYVKQLNEDCRLRLRKFRKDGDGKARAIPLVGEMATFLSQDIVRMIISEETKKLITSAYYNEMQRSLAQYAGEENRRQFRAIVAELHLLDPSSGHPFLSATMETAHRYTEDFYKCYLEKKREWLAKTFYRPEQDENTKRRISVFFVPDGEARKLLPLLIRRRMKEQNDLQDWIRNKQAHPIDLPSHLFDSKIMELLKVKDGKKKWNEAFKDWWSTKYPDGMQPFYGLRRELNIHGKSVSYIPSDGKKFADCYTHLMEKTVQDKKRELRTAGKPVPPDLAADIKRSFHRAVNEREFMLRLVQEDDRLMLMAINKMMTDREEDILPGLKNIDSILDEENQFSLAVHAKVLEKEGEGGDNSLSLVPATIEIKSKRKDWSKYIRYRYDRRVPGLMSHFPEHKATLDEVKTLLGEYDRCRIKIFDWAFALEGAIMSDRDLKPYLHESSSREGKSGEHSTLVKMLVEKKGCLTPDESQYLILIRNKAAHNQFPCAAEMPLIYRDVSAKVGSIEGSSAKDLPEGSSLVDSLWKKYEMIIRKILPILDPENRFFGKLLNNMSQPINDL

SEQ ID NO: 560 - protein, 1135 aa, Porphyromonas gingivalis
MNTVPASENKGQSRTVEDDPQYFGLYLNLARENLIEVESHVRIKFGKKKLNEESLKQSLLCDHLLSVDRWTKVYGHSRRYLPFLHYFDPDSQIEKDHDSKTGVDPDSAQRLIRELYSLLDFLRNDFSHNRLDGTTFEHLEVSPDISSFITGTYSLACGRAQSRFADFFKPDDFVLAKNRKEQLISVADGKECLTVSGLAFFICLFLDREQASGMLSRIRGFKRTDENWARAVHETFCDLCIRHPHDRLESSNTKEALLLDMLNELNRCPRILYDMLPEEERAQFLPALDENSMNNLSENSLNEESRLLWDGSSDWAEALTKRIRHQDRFPYLMLRFIEEMDLLKGIRFRVDLGEIELDSYSKKVGRNGEYDRTITDHALAFGKLSDFQNEEEVSRMISGEASYPVRFSLFAPRYAIYDNKIGYCHTSDPVYPKSKTGEKRALSNPRSMGFISVHDLRKLLLMELLCEGSFSRMQSDFLRKANRILDETAEGKLQFSALFPEMRHRFIPPQNPKSKDRREKAETTLEKYKQEIKGRKDKLNSQLLSAFDMDQRQLPSRLLDEWMNIRPASHSVKLRTYVKQLNEDCRLRLQKFRKDGDGKARAIPLVGEMATFLSQDIVRMIISEETKKLITSAYYNEMQRSLAQYAGEENRHQFRAIVAELRLLDPSSGHPFLSATMETAHRYTEDFYKCYLEKKREWLAKTFYRPEQDENTKRRISVFFVPDGEARKLLPLLIRRRMKEQNDLQDWIRNKQAHPIDLPSHLFDSKIMELLKVKDGKKKWNEAFKDWWSTKYPDGMQPFYGLRRELNIHGKSVSYIPSDGKKFADCYTHLMEKTVQDKKRELRTAGKPVPPDLAADIKRSFHRAVNEREFMLRLVQEDDRLMLMAINKMMTDREEDILPGLKNIDSILDEENQFSLAVHAKVLEKEGEGGDNSLSLVPATIEIKSKRKDWSKYIRYRYDRRVPGLMSHFPEHKATLDEVKTLLGEYDRCRIKIFDWAFALEGAIMSDRDLKPYLHESSSREGKSGEHSTLVKMLVEKKGCLTPDESQYLILIRNKAAHNQFPCAAEMPLIYRDVSAKVGSIEGSSAKDLPEGSSLVDSLWKKYEMIIRKILPILDPENRFFGKLLNNMSQPINDL

SEQ ID NO: 561 - protein, 1135 aa, Porphyromonas gingivalis
MNTVPASENKGQSRTVEDDPQYFGLYLNLARENLIEVESHVRIKFGKKKLNEESLKQSLLCDHLLSVDRWTKVYGHSRRYLPFLHYFDPDSQIEKDHDSKTGVDPDSAQRLIRELYSLLDFLRNDFSHNRLDGTTFEHLEVSPDISSFITGTYSLACGRAQSRFADFFKPDDFVLAKNRKEQLISVADGKECLTVSGLAFFICLFLDREQASGMLSRIRGFKRTDENWARAVHETFCDLCIRHPHDRLESSNTKEALLLDMLNELNRCPRILYDMLPEEERAQFLPALDENSMNNLSENSLNEESRLLWDGSSDWAEALTKRIRHQDRFPYLMLRFIEEMDLLKGIRFRVDLGEIELDSYSKKVGRNGEYDRTITDHALAFGKLSDFQNEEEVSRMISGEASYPVRFSLFAPRYAIYDNKIGYCHTSDPVYPKSKTGEKRALSNPRSMGFISVHDLRKLLLMELLCEGSFSRMQSDFLRKANRILDETAEGKLQFSALFPEMRHRFIPPQNPKSKDRREKAETTLEKYKQEIKGRKDKLNSQLLSAFDMDQRQLPSRLLDEWMNIRPASHSVKLRTYVKQLNEDCRLRLQKFRKDGDGKARAIPLVGEMATFLSQDIVRMIISEETKKLITSAYYNEMQRSLAQYAGEENRHQFRAIVAELRLLDPSSGHPFLSATMETAHRYTEDFYKCYLEKKREWLAKTFYRPEQDENTKRRISVFFVPDGEARKLLPLLIRRRMKEQNDLQDWIRNKQAHPIDLPSHLFDSKVMELLKVKDGKKKWNEAFKDWWSTKYPDGMQPFYGLRRELNIHGKSVSYIPSDGKKFADCYTHLMEKTVRDKKRELRTAGKPVPPDLAAYIKRSFHRAVNEREFMLRLVQEDDRLMLMAINKIMTDREEDILPGLKNIDSILDKENQFSLAVHAKVLEKEGEGGDNSLSLVPATIEIKSKRKDWSKYIRYRYDRRVPGLMSHFPEHKATLDEVKTLLGEYDRCRIKIFDWAFALEGAIMSDRDLKPYLHESSSREGKSGEHSTLVKMLVEKKGCLTPDESQYLILIRNKAAHNQFPCAAEIPLIYRDVSAKVGSIEGSSAKDLPEGSSLVDSLWKKYEMIIRKILPILDPENRFFGKLLNNMSQPINDL

SEQ ID NO: 562 - protein, 1135 aa, Porphyromonas gingivalis; identical to SEQ ID NO: 561

SEQ ID NO: 563 - protein, 1135 aa, Porphyromonas gingivalis; identical to SEQ ID NO: 560

SEQ ID NO: 564 - protein, 1135 aa, Porphyromonas gingivalis
MNTVPASENKGQSRTVEDDPQYFGLYLNLARENLIEVESHVRIKFGKKKLNEESLKQSLLCDHLLSVDRWTKVYGHSRRYLPFLHYFDPDSQIEKDHDSKTGVDPDSAQRLIRELYSLLDFLRNDFSHNRLDGTTFEHLEVSPDISSFITGTYSLACGRAQSRFADFFKPDDFVLAKNRKEQLISVADGKECLTVSGLAFFICLFLDREQASGMLSRIRGFKRTDENWARAVHETFCDLCIRHPHDRLESSNTKEALLLDMLNELNRCPRILYDMLPEEERAQFLPALDENSMNNLSENSLNEESRLLWDGSSDWAEALTKRIRHQDRFPYLMLRFIEEMDLLKGIRFRVDLGEIELDSYSKKVGRNGEYDRTITDHALAFGKLSDFQNEEEVSRMISGEASYPVRFSLFAPRYAIYDNKIGYCHTSDPVYPKSKTGEKRALSNPQSMGFISVHDLRKLLLMELLCEGSFSRMQSGFLRKANRILDETAEGKLQFSALFPEMRHRFIPPQNPKSKDRREKAETTLEKYKQEIKGRKDKLNSQLLSAFDMNQRQLPSRLLDEWMNIRPASHSVKLRTYVKQLNEDCRLRLRKFRKDGDGKARAIPLVGEMATFLSQDIVRMIISEETKKLITSAYYNEMQRSLAQYAGEENRRQFRAIVAELHLLDPSSGHPFLSATMETAHRYTEDFYKCYLEKKREWLAKTFYRPEQDENTKRRISVFFVPDGEARKLLPLLIRRRMKEQNDLQDWIRNKQAHPIDLPSHLFDSKIMELLKVKDGKKKWNEAFKDWWSTKYPDGMQPFYGLRRELNIHGKSVSYIPSDGKKFADCYTHLMEKTVQDKKRELRTAGKPVPPDLAADIKRSFHRAVNEREFMLRLVQEDDRLMLMAINKMMTDREEDILPGLKNIDSILDKENQFSLAVHAKVLEKEGEGGDNSLSLVPATIEIKSKRKDWSKYIRYRYDRRVPGLMSHFPEHKATLDEVKTLLGEYDRCRIKIFDWAFALEGAIMSDRDLKPYLHESSSREGKSGEHSTLVKMLVEKKGCLTPDESQYLILIRNKAAHNQFPCAAEMPLIYRDVSAKVGSIEGSSAKDLPEGSSLVDSLWKKYEMIIRKILPILDPENRFFGKLLNNMSQPINDL

SEQ ID NO: 565 - protein, 1135 aa, Porphyromonas gulae
MNTVPATENKGQSRTVEDDPQYFGLYLNLARENLIEVESHVRIKFGKKKLNEESLKQSLLCDHLLSIDRWTKVYGHSRRYLPFLHCFDPDSGIEKDHDSKTGVDPDSAQRLIRELYSLLDFLRNDFSHNRLDGTTFEHLKVSPDISSFITGAYTFACERAQSRFADFFKPDDFLLAKNRKEQLISVADGKECLTVSGFAFFICLFLDREQASGMLSRIRGFKRTDENWARAVHETFCDLCIRHPHDRLESSNTKEALLLDMLNELNRCPRILYDMLPEEERAQFLPALDENSMNNLSENSLNEESRLLWDGSSDWAEALTKRIRHQDRFPYLMLRFIEEMDLLKGIRFRVDLGEIELDSYSKKVGRNGEYDRTITDHALAFGKLSDFQNEEEVSRMISGEASYPVRFSLFAPRYAIYDNKIGYCHTSDPVYPKSKTGEKRALSNPQSMGFISVHDLRKLLLMELLCEGSFSRMQSDFLRKANRILDETAEGKLQFSALFPEMRHRFIPPQNPKSKDRREKAETTLEKYKQEIKGRKDKLNSQLLSAFDMNQRQLPSRLLDEWMNIRPASHSVKLRTYVKQLNEDCRLRLRKFRKDGDGKARAIPLVGEMATFLSQDIVRMIISEETKKLITSAYYNEMQRSLAQYAGEENRRQFRAIVAELHLLDPSSGHPFLSATMETAHRYTEDFYKCYLEKKREWLAKTFYRPEQDENTKRRISVFFVPDGEARKLLPLLIRRRMKEQNDLQDWIRNKQAHPIDLPSHLFDSKIMELLKVKDGKKKWNEAFKDWWSTKYPDGMQPFYGLRRELNIHGKSVSYIPSDGKKFADCYTHLMEKTVRDKKRELRTAGKPVPPDLAAYIKRSFHRAVNEREFMLRLVQEDDRLMLMAINKMMTDREEDILPGLKNIDSILDEENQFSLAVHAKVLEKEGEGGDNSLSLVPATIEIKSKRKDWSKYIRYRYDRRVPGLMSHFPEHKATLDEVKTLLGEYDRCRIKIFDWAFALEGAIMSDRDLKPYLHESSSREGKSGEHSTLVKMLVEKKGCLTPDESQYLILIRNKAAHNQFPCAAEMPLIYRDVSAKVGSIEGSSAKDLPEGSSLVDSLWKKYEMIIRKILPILDHENRFFGKLLNNMSQPINDL

SEQ ID NO: 566 - protein, 1115 aa, Bacteroides pyogenes
MESIKNSQKSTGKTLQKDPPYFGLYLNMALLNVRKVENHIRKWLGDVALLPEKSGFHSLLTTDNLSSAKWTRFYYKSRKFLPFLEMFDSDKKSYENRRETTECLDTIDRQKISSLLKEVYGKLQDIRNAFSHYHIDDQSVKHTALIISSEMHRFIENAYSFALQKTRARFTGVFVETDFLQAEEKGDNKKFFAIGGNEGIKLKDNALIFLICLFLDREEAFKFLSRATGFKSTKEKGFLAVRETFCALCCRQPHERLLSVNPREALLMDMLNELNRCPDILFEMLDEKDQKSFLPLLGEEEQAHILENSLNDELCEAIDDPFEMIASLSKRVRYKNRFPYLMLRYIEEKNLLPFIRFRIDLGCLELASYPKKMGEENNYERSVTDHAMAFGRLTDFHNEDAVLQQITKGITDEVRFSLYAPRYAIYNNKIGFVRTGGSDKISFPTLKKKGGEGHCVAYTLQNTKSFGFISIYDLRKILLLSFLDKDKAKNIVSGLLEQCEKHWKDLSENLFDAIRTELQKEFPVPLIRYTLPRSKGGKLVSSKLADKQEKYESEFERRKEKLTEILSEKDFDLSQIPRRMIDEWLNVLPTSREKKLKGYVETLKLDCRERLRVFEKREKGEHPVPPRIGEMATDLAKDIIRMVIDQGVKQRITSAYYSEIQRCLAQYAGDDNRRHLDSIIRELRLKDTKNGHPFLGKVLRPGLGHTEKLYQRYFEEKKEWLEATFYPAASPKRVPRFVNPPTGKQKELPLIIRNLMKERPEWRDWKQRKNSHPIDLPSQLFENEICRLLKDKIGKEPSGKLKWNEMFKLYWDKEFPNGMQRFYRCKRRVEVFDKVVEYEYSEEGGNYKKYYEALIDEVVRQKISSSKEKSKLQVEDLTLSVRRVFKRAINEKEYQLRLLCEDDRLLFMAVRDLYDWKEAQLDLDKIDNMLGEPVSVSQVIQLEGGQPDAVIKAECKLKDVSKLMRYCYDGRVKGLMPYFANHEATQEQVEMELRHYEDHRRRVFNWVFALEKSVLKNEKLRRFYEESQGGCEHRRCIDALRKASLVSEEEYEFLVHIRNKSAHNQFPDLEIGKLPPNVTSGFCECIWSKYKAIICRIIPFIDPERRFFGKLLEQK

SEQ ID NO: 567 - protein, 1115 aa, Bacteroides pyogenes; identical to SEQ ID NO: 150

SEQ ID NO: 568 - protein, 953 aa, Alistipes sp.; identical to SEQ ID NO: 151

SEQ ID NO: 569 - protein, 1150 aa, Flavobacterium branchiophilum; identical to SEQ ID NO: 161

SEQ ID NO: 570 - protein, 1322 aa, Prevotella sp.; identical to SEQ ID NO: 152

SEQ ID NO: 571 - protein, 1159 aa, Myroides odoratimimus; identical to SEQ ID NO: 156

SEQ ID NO: 572 - protein, 1157 aa, Myroides odoratimimus
MKDILTTDTTEKQNRFYSHKIADKYFFGGYFNLASNNIYEVFEEVNKRNTFGKLAKRDNGNLKNYIIHVFKDELSISDFEKRVAIFASYFPILETVDKKSIKERNRTIDLTLSQRIRQFREMLISLVTAVDQLRNFYTHYHHSEIVIENKVLDFLNSSLVSTALHVKDKYLKTDKTKEFLKETIAAELDILIEAYKKKQIEKKNTRFKANKREDILNAIYNEAFWSFINDKDKDKETVVAKGADAYFEKNHHKSNDPDFALNISEKGIVYLLSFFLTNKEMDSLKANLTGFKGKVDRESGNSIKYMATQRIYSFHTYRGLKQKIRTSEEGVKETLLMQMIDELSKVPNVVYQHLSTTQQNSFIEDWNEYYKDYEDDVETDDLSRVIHPVIRKRYEDRFNYFAIRFLDEFFDFPTLRFQVHLGDYVHDRRTKQLGKVESDRIIKEKVTVFARLKDINSAKASYFHSLEEQDKEELDNKWTLFPNPSYDFPKEHTLQHQGEQKNAGKIGIYVKLRDTQYKEKAALEEARKSLNPKERSATKASKYDIITQIIEANDNVKSEKPLVFTGQPIAYLSMNDIHSMLFSLLTDNAELKKTPEEVEAKLIDQIGKQINEILSKDTDTKILKKYKDNDLKETDTDKITRDLARDKEEIEKLILEQKQRADDYNYTSSTKFNIDKSRKRKHLLFNAEKGKIGVWLANDIKRFMFKESKSKWKGYQHTELQKLFAYFDTSKSDLELILSDMVMVKDYPIELIDLVRKSRTLVDFLNKYLEARLGYIENVITRVKNSIGTPQFKTVRKECFAFLKESNYTVASLDKQIERILSMPLFIERGFMDSKPTMLEGKSYQQHKEDFADWFVHYKENSNYQNFYDTEVYEIITEDKREQAKVTKKIKQQQKNDVFTLMMVNYMLEEVLKLPSNDRLSLNELYQTKEERIVNKQVAKDTQERNKNYIWNKVVDLQLCEGLVRIDKVKLKDIGNFRKYENDSRVKEFLTYQSDIVWSGYLSNEVDSNKLYVIERQLDNYESIRSKELLKEVQEIECIVYNQVANKESLKQSGNENFKQYVLQGLLPRGTDVREMLILSTDVKFKKEEIMQLGQVREVEQDLYSLIYIRNKFAHNQLPIKEFFDFCENNYRPISDNEYYAEYYMEIFRSIKEKYAS

SEQ ID NO: 573 - protein, 1157 aa, Myroides odoratimimus; identical to SEQ ID NO: 572

SEQ ID NO: 574 - protein, 1157 aa, Myroides odoratimimus
MKDILTTDTTEKQNRFYSHKIADKYFFGGYFNLASNNIYEVFEEVNKRNTFGKLAKRDNGNLKNYIIHVFKDELSISDFEKRVAIFASYFPILETVDKKSIKERNRTIDLTLSQRIRQFREMLISLVTAVDQLRNFYTHYHHSEIVIENKVLDFLNSSLVSTALHVKDKYLKTDKTKEFLKETIAAELDILIEAYKKKQIEKKNTRFKANKREDILNAIYNEAFWSFINDKDKDKETVVAKGADAYFEKNHHKSNDPDFALNISEKGIVYLLSFFLTNKEMDSLKANLTGFKGKVDRESGNSIKYMATQRIYSFHTYRGLKQKIRTSEEGVKETLLMQMIDELSKVPNVVYQHLSTTQQNSFIEDWNEYYKDYEDDVETDDLSRVIHPVIRKRYEDRFNYFAIRFLDEFFDFPTLRFQVHLGDYVHDRRTKQLGKVESDRIIKEKVTVFARLKDINSAKANYFHSLEEQDKEELDNKWTLFPNPSYDFPKEHTLQHQGEQKNAGKIGIYVKLRDTQYKEKAALEEARKSLNPKERSATKASKYDIITQIIEANDNVKSEKPLVFTGQPIAYLSMNDIHSMLFSLLTDNAELKKTPEEVEAKLIDQIGKQINEILSKDTDTKILKKYKDNDLKETDTDKITRDLARDKEEIEKLILEQKQRADDYNYTSSTKFNIDKSRKRKHLLFNAEKGKIGVWLANDIKRFMTEEFKSKWKGYQHTELQKLFAYYDTSKSDLDLILSDMVMVKDYPIELIALVKKSRTLVDFLNKYLEARLGYMENVITRVKNSIGTPQFKTVRKECFTFLKKSNYTVVSLDKQVERILSMPLFIERGFMDDKPTMLEGKSYQQHKEKFADWFVHYKENSNYQNFYDTEVYEITTEDKREKAKVTKKIKQQQKNDVFTLMMVNYMLEEVLKLSSNDRLSLNELYQTKEERIVNKQVAKDTQERNKNYIWNKVVDLQLCEGLVRIDKVKLKDIGNFRKYENDSRVKEFLTYQSDIVWSAYLSNEVDSNKLYVIERQLDNYESIRSKELLKEVQEIECSVYNQVANKESLKQSGNENFKQYVLQGLVPIGMDVREMLILSTDVKFIKEEIIQLGQAGEVEQDLYSLIYIRNKFAHNQLPIKEFFDFCENNYRSISDNEYYAEYYMEIFRSIKEKYTS

SEQ ID NO: 575 - protein, 1157 aa, Myroides odoratimimus; identical to SEQ ID NO: 574

SEQ ID NO: 576 - protein, 1159 aa, Myroides odoratimimus; identical to SEQ ID NO: 162

SEQ ID NO: 577 - protein, 1224 aa, Bergeyella zoohelcum; identical to SEQ ID NO: 146

SEQ ID NO: 578 - protein, 1218 aa, Capnocytophaga cynodegmi
MENKTSLGNNIYYNPFKPQDKSYFAGYLNAAMENIDSVFRELGKRLKGKEYTSENFFDAIFKENISLVEYERYVKLLSDYFPMARLLDKKEVPIKERKENFKKNFRGIIKAVRDLRNFYTHKEHGEVEITDEIFGVLDEMLKSTVLTVKKKKIKTDKTKEILKKSIEKQLDILCQKKLEYLKDTARKIEEKRRNQRERGEKKLVPRFEYSDRRDDLIAAIYNDAFDVYIDKKKDSLKESSKTKYNTESYPQQEEGDLKIPISKNGVVFLLSLFLSKQEVHAFKSKIAGFKATVIDEATVSHRKNSICFMATHEIFSHLAYKKLKRKVRTAEINYSEAENAEQLSIYAKETLMMQMLDELSKVPDVVYQNLSEDVQKTFIEDWNEYLKENNGDVGTMEEEQVIHPVIRKRYEDKFNYFAIRFLDEFAQFPTLRFQVHLGNYLHDSRPKEHLISDRRIKEKITVFGRLSELEHKKALFIKNTETNEDRKHYWEVFPNPNYDFPKENISVNDKDFPIAGSILDREKQPTAGKIGIKVNLLNQKYISEVDKAVKAHQLKQRNNKPSIQNIIEEIVPINGSNPKEIIVFGGQPTAYLSMNDIHSILYEFFDKWEKKKEKLEKKGEKELRKEIGKELEEKIVGKIQTQIQQIIDKDINAKILKPYQDDDSTAIDKEKLIKDLKQEQKILQKLKNEQTAREKEYQECIAYQEESRKIKRSDKSRQKYLRNQLKRKYPEVPTRKEILYYQEKGKVAVWLANDIKRFMPTDFKNEWKGEQHSLLQKSLAYYEQCKEELKNLLPQQKVFKHLPFELGGHFQQKYLYQFYTRYLDKRLEHISGLVQQAENFKNENKVFKKVENECFKFLKKQNYTHKGLDAQAQSVLGYPIFLERGFMDEKPTIIKGKTFKGNESLFTDWFRYYKEYQNFQTFYDTENYPLVELEKKQADRKRETKIYQQKKNDVFTLLMAKHIFKSVFKQDSIDRFSLEDLYQSREERLENQEKAKQTGERNTNYIWNKTVDLNLCDGKVTVENVKLKNVGNFIKYEYDQRVQTFLKYEENIKWQAFLIKESKEEENYPYIVEREIEQYEKVRREELLKEVHLIEEYILEKVKDKEILKKGDNQNFKYYILNGLLKQLKNEDVESYKVFNLNTKPEDVNINQLKQEATDLEQKAFVLTYIRNKFAHNQLPKKEFWDYCQEKYGKIEKEKTYAEYFAEVFKREKEALMK

SEQ ID NO: 579 - protein, 1224 aa, Bergeyella zoohelcum; identical to SEQ ID NO: 146

SEQ ID NO: 580 - protein, 1155 aa, Flavobacterium sp.
MDNNITVEKTELGLGITYNHDKVEDKHYFGGFFNLAQNNIDLVAQEFKKRLLIQGKDSINIFANYFSDQCSITNLERGIKILAEYFPVVSYIDLDEKNKSKSIREHLILLLETINNLRNYYTHYYHKKIIIDGSLFPLLDTILLKVVLEIKKKKLKEDKTKQLLKKGLEKEMTILFNLMKAEQKEKKIKGWNIDENIKGAVLNRAFSHLLYNDELSDYRKSKYNTEDETLKDTLTESGILFLLSFFLNKKEQEQLKANIKGYKGKIASIPDEEITLKNNSLRNMATHWTYSHLTYKGLKHRIKTDHEKETLLVNMVDYLSKVPHEIYQNLSEQNKSLFLEDINEYMRDNEENHDSSEASRVIHPVIRKRYENKFAYFAIRFLDEFAEFPTLRFMVNVGNYIHDNRKKDIGGTSLITNRTIKQQINVFGNLTEIHKKKNDYFEKEENKEKTLEWELFPNPSYHFQKENIPIFIDLEKSKETNDLAKEYAKEKKKIFGSSRKKQQNTAKKNRETIINLVFDKYKTSDRKTVTFEQPTALLSFNELNSFLYAFLVENKTGKELEKIIIEKIANQYQILKNCSSTVDKTNDNIPKSIKKIVNTTTDSFYFEGKKIDIEKLEKDITIEIEKTNEKLETIKENEESAQNYKRNERNTQKRKLYRKYVFFTNEIGIEATWITNDILRFLDNKENWKGYQHSELQKFISQYDNYKKEALGLLESEWNLESDAFFGQNLKRMFQSNSTFETFYKKYLDNRKNTLETYLSAIENLKTMTDVRPKVLKKKWTELFRFFDKKIYLLSTIETKINELITKPINLSRGIFEEKPTFINGKNPNKENNQHLFANWFIYAKKQTILQDFYNLPLEQPKAITNLKKHKYKLERSINNLKIEDIYIKQMVDFLYQKLFEQSFIGSLQDLYTSKEKREIEKGKAKNEQTPDESFIWKKQVEINTHNGRIIAKTKIKDIGKFKNLLTDNKIAHLISYDDRIWDFSLNNDGDITKKLYSINTELESYETIRREKLLKQIQQFEQFLLEQETEYSAERKHPEKFEKDCNPNFKKYIIEGVLNKIIPNHEIEEIEILKSKEDVFKINFSDILILNNDNIKKGYLLIMIRNKFAHNQLIDKNLFNFSLQLYSKNENENFSEYLNKVCQNIIQEFKEKLK

SEQ ID NO: 581 - protein, 1145 aa, Psychroflexus torquis
MESIIGLGLSFNPYKTADKHYFGSFLNLVENNLNAVFAEFKERISYKAKDENISSLIEKHFIDNMSIVDYEKKISILNGYLPIIDFLDDELENNLNTRVKNFKKNFIILAEAIEKLRDYYTHFYHDPITFEDNKEPLLELLDEVLLKTILDVKKKYLKTDKTKEILKDSLREEMDLLVIRKTDELREKKKTNPKIQHTDSSQIKNSIFNDAFQGLLYEDKGNNKKTQVSHRAKTRLNPKDIHKQEERDFEIPLSTSGLVFLMSLFLSKKEIEDFKSNIKGFKGKVVKDENHNSLKYMATHRVYSILAFKGLKYRIKTDTFSKETLMMQMIDELSKVPDCVYQNLSETKQKDFIEDWNEYFKDNEENTENLENSRVVHPVIRKRYEDKFNYFAIRFLDEFANFKTLKFQVFMGYYIHDQRTKTIGTTNITTERTVKEKINVFGKLSKMDNLKKHFFSQLSDDENTDWEFFPNPSYNFLTQADNSPANNIPIYLELKNQQIIKEKDAIKAEVNQTQNRNPNKPSKRDLLNKILKTYEDFHQGDPTAILSLNEIPALLHLFLVKPNNKTGQQIENIIRIKIEKQFKAINHPSKNNKGIPKSLFADTNVRVNAIKLKKDLEAELDMLNKKHIAFKENQKASSNYDKLLKEHQFTPKNKRPELRKYVFYKSEKGEEATWLANDIKRFMPKDFKTKWKGCQHSELQRKLAFYDRHTKQDIKELLSGCEFDHSLLDINAYFQKDNFEDFFSKYLENRIETLEGVLKKLHDFKNEPTPLKGVFKNCFKFLKRQNYVTESPEIIKKRILAKPTFLPRGVFDERPTMKKGKNPLKDKNEFAEWFVEYLENKDYQKFYNAEEYRMRDADFKKNAVIKKQKLKDFYTLQMVNYLLKEVFGKDEMNLQLSELFQTRQERLKLQGIAKKQMNKETGDSSENTRNQTYIWNKDVPVSFFNGKVTIDKVKLKNIGKYKRYERDERVKTFIGYEVDEKWMMYLPHNWKDRYSVKPINVIDLQIQEYEEIRSHELLKEIQNLEQYIYDHTTDKNILLQDGNPNFKMYVLNGLLIGIKQVNIPDFIVLKQNTNFDKIDFTGIASCSELEKKTIILIAIRNKFAHNQLPNKMIYDLANEFLKIEKNETYANYYLKVLKKMISDLA

SEQ ID NO: 582 - protein, 1179 aa, Flavobacterium columnare
MSSKNESYNKQKTFNHYKQEDKYFFGGFLNNADDNLRQVGKEFKTRINFNHNNNELASVFKDYFNKEKSVAKREHALNLLSNYFPVLERIQKHTNHNFEQTREIFELLLDTIKKLRDYYTHHYHKPITINPKIYDFLDDTLLDVLITIKKKKVKNDTSRELLKEKLRPELTQLKNQKREELIKKGKKLLEENLENAVFNHCLRPFLEENKTDDKQNKTVSLRKYRKSKPNEETSITLTQSGLVFLMSFFLHRKEFQVFTSGLEGFKAKVNTIKEEEISLNKNNIVYMITHWSYSYYNFKGLKHRIKTDQGVSTLEQNNTTHSLTNTNTKEALLTQIVDYLSKVPNEIYETLSEKQQKEFEEDINEYMRENPENEDSTFSSIVSHKVIRKRYENKFNYFAMRFLDEYAELPTLRFMVNFGDYIKDRQKKILESIQFDSERIIKKEIHLFEKLSLVTEYKKNVYLKETSNIDLSRFPLFPNPSYVMANNNIPFYIDSRSNNLDEYLNQKKKAQSQNKKRNLTFEKYNKEQSKDAIIAMLQKEIGVKDLQQRSTIGLLSCNELPSMLYEVIVKDIKGAELENKIAQKIREQYQSIRDFTLDSPQKDNIPTTLIKTINTDSSVTFENQPIDIPRLKNAIQKELTLTQEKLLNVKEHEIEVDNYNRNKNTYKFKNQPKNKVDDKKLQRKYVFYRNEIRQEANWLASDLIHFMKNKSLWKGYMHNELQSFLAFFEDKKNDCIALLETVFNLKEDCILTKGLKNLFLKHGNFIDFYKEYLKLKEDFLNTESTFLENGLIGLPPKILKKELSKRFKYIFIVFQKRQFIIKELEEKKNNLYADAINLSRGIFDEKPTMIPFKKPNPDEFASWFVASYQYNNYQSFYELTPDIVERDKKKKYKNLRAINKVKIQDYYLKLMVDTLYQDLFNQPLDKSLSDFYVSKAEREKIKADAKAYQKRNDSSLWNKVIHLSLQNNRITANPKLKDIGKYKRALQDEKIATLLTYDDRTWTYALQKPEKENENDYKELHYTALNMELQEYEKVRSKELLKQVQELEKQILEEYTDFLSTQIHPADFEREGNPNFKKYLAHSILENEDDLDKLPEKVEAMRELDETITNPIIKKAIVLIIIRNKMAHNQYPPKFIYDLANRFVPKKEEEYFATYFNRVFETITKELWENKEKKDKTQV

SEQ ID NO: 583 - protein, 1213 aa, Flavobacterium columnare
MSSKNESYNKQKTFNHYKQEDKYFFGGFLNNADDNLRQVGKEFKTRINFNHNNNELASVFKDYFNKEKSVAKREHALNLLSNYFPVLERIQKHTNHNFEQTREIFELLLDTIKKLRDYYTHHYHKPITINPKVYDFLDDTLLDVLITIKKKKVKNDTSRELLKEKFRPELTQLKNQKREELIKKGKKLLEENLENAVFNHCLRPFLEENKTDDKQNKTVSLRKYRKSKPNEETSITLTQSGLVFLISFFLHRKEFQVFTSGLEGFKAKVNTIKEEEISLNKNNIVYMITHWSYSYYNFKGLKHRIKTDQGVSTLEQNNTTHSLTNTNTKEALLTQIVDYLSKVPNEIYETLSEKQQKEFEEDINEYMRENPENEDSTFSSIVSHKVIRKRYENKFNYFAMRFLDEYAELPTLRFMVNFGDYIKDRQKKILESIQFDSERIIKKEIHLFEKLGLVTEYKKNVYLKETSNIDLSRFPLFPSPSYVMANNNIPFYIDSRSNNLDEYLNQKKKAQSQNRKRNLTFEKYNKEQSKDAIIAMLQKEIGVKDLQQRSTIGLLSCNELPSMLYEVIVKDIKGAELENKIAQKIREQYQSIRDFTLDSPQKDNIPTTLTKTISTDTSVTFENQPIDIPRLKNALQKELTLTQEKLLNVKQHEIEVDNYNRNKNTYKFKNQPKDKVDDNKLQRKYVFYRNEIGQEANWLASDLIHFMKNKSLWKGYMHNELQSFLAFFEDKKNDCIALLETVFNLKEDCILTKDLKNLFLKHGNFIDFYKEYLKLKEDFLNTESTFLENGFIGLPPKILKKELSKRLNYIFIVFQKRQFIIKELEEKKNNLYADAINLSRGIFDEKPTMIPFKKPNPDEFASWFVASYQYNNYQSFYELTPDKIENDKKKKYKNLRAINKVKIQDYYLKLMVDTLYQDLFNQPLDKSLSDFYVSKTDREKIKADAKAYQKRNDSFLWNKVIHLSLQNNRITANPKLKDIGKYKRALQDEKIATLLTYDDRTWTYALQKPEKENENDYKELHYTALNMELQEYEKVRSKKLLKQVQELEKQILDKFYDFSNNATHPEDLEIEDKKGKRHPNFKLYITKALLKNESEIINLENIDIEILIKYYDYNTEKLKEKIKNMDEDEKAKIVNTKENYNKITNVLIKKALVLIIIRNKMAHNQYPPKFIYDLATRFVPKKEEEYFACYFNRVFETITTELWENKKKAKEIV

SEQ ID NO: 584 - protein, 1213 aa, Flavobacterium columnare
MSSKNESYNKQKTFNHYKQEDKYFFGGFLNNADDNLRQVGKEFKTRINFNHNNNELASVFKDYFNKEKSVAKREHALNLLSNYFPVLERIQKHTNHNFEQTREIFELLLDTIKKLRDYYTHHYHKPITINPKIYDFLDDTLLDVLITIKKKKVKNDTSRELLKEKLRPELTQLKNQKREELIKKGKKLLEENLENAVFNHCLRPFLEENKTDDKQNKTVSLRKYRKSKPNEETSITLTQSGLVFLMSFFLHRKEFQVFTSGLEGFKAKVNTIKEEKISLNKNNIVYMITHWSYSYYNFKGLKHRIKTDQGVSTLEQNNTTHSLTNTNTKEALLTQIVDYLSKVPNEIYETLSEKQQKEFEEDINEYMRENPENEDSTFSSIVSHKVIRKRYENKFNYFAMRFLDEYAELPTLRFMVNFGDYIKDRQKKILESIQFDSERIIKKEIHLFEKLGLVTEYKKNVYLKETSNIDLSRFPLFPSPSYVMANNNIPFYIDSRSNNLDEYLNQKKKAQSQNRKRNLTFEKYNKEQSKDAIIAMLQKEIGVKDLQQRSTIGLLSCNELPSMLYEVIVKDIKGAELENKIAQKIREQYQSIRDFTLNSPQKDNIPTTLIKTISTDTSVTFENQPIDIPRLKNAIQKELALTQEKLLNVKQHEIEVNNYNRNKNTYKFKNQPKDKVDDNKLQRKYVFYRNEIGQEANWLASDLIHFMKNKSLWKGYMHNELQSFLAFFEDKKNDCIALLETVFNLKEDCILTKDLKNLFLKHGNFIDFYKEYLKLKEDFLNTESTFLENGFIGLPPKILKKELSKRLNYIFIVFQKRQFIIKELEEKKNNLYADAINLSRGIFDEKPTMIPFKKPNPDEFASWFVASYQYNNYQSFYELTPDKIENDKKKKYKNLRAINKVKIQDYYLKLMVDTLYQDLFNQPLDKSLSDFYVSKTDREKIKADAKAYQKRNDSFLWNKVIHLSLQNNRITANPKLKDIGKYKRALQDEKIATLLTYDDRTWTYALQKPEKENENDYKELHYTALNMELQEYEKVRSKKLLKQVQELEKQILDKFYDFSNNATHPEDLEIEDKKGKRHPNFKLYITKALLKNESEIINLENIDIEILIKYYDYNTEKLKEKIKNMDEDEKAKIVNTKENYNKITNVLIKKALVLIIIRNKMAHNQYPPKFIYDLATRFVPKKEEEYFACYFNRVFETITTELWENKKKAKEIV

SEQ ID NO: 585 - protein, 1214 aa, Flavobacterium columnare; identical to SEQ ID NO: 163

SEQ ID NO: 586 - protein, 1145 aa, Chryseobacterium sp.
METQTIGHGIAYDHSKIQDKHFFGGFLNLAENNIKAVLKAFSEKFNVGNVDVKQFADVSLKDNLPDNDFQKRVSFLKMYFPVVDFINIPNNRAKFRSDLTTLFKSVDQLRNFYTHYYHKPLDFDASLFILLDDIFARTAKEVRDQKMKDDKTRQLLSKSLSEELQKGYELQLERLKELNRLGKKVNIHDQLGIKNGVLNNAFNHLIYKDGESFKTKLTYSSALTSFESAENGIEISQSGLLFLLSMFLKRKEIEDLKNRNKGFKAKVVIDEDGKVNGLKFMATHWVFSYLCFKGLKSKLSTEFHEETLLIQIIDELSKVPDELYCAFDKETRDKFIEDINEYVKEGHQDFSLEDAKVIHPVIRKRYENKFNYFAIRFLDEFVKFPSLRFQVHVGNYVHDRRIKNIDGTTFETERVVKDRIKVFGRLSEISSYKAQYLSSVSDKHDETGWEIFPNPSYVFINNNIPIHISVDTSFKKEIADFKKLRRAQVPDELKIRGAEKKRKFEITQMIGSKSVLNQEEPIALLSLNEIPALLYEILINGKEPAEIERIIKDKLNERQDVIKNYNPENWLPASQISRRLRSNKGERIINTDKLLQLVTKELLVTEQKLKIISDNREALKQKKEGKYIRKFIFTNSELGREAIWLADDIKRFMPADVRKEWKGYQHSQLQQSLAFYNSRPKEALAILESSWNLKDEKIIWNEWILKSFTQNKFFDAFYNEYLKGRKKYFAFLSEHIVQYTSNAKNLQKFIKQQMPKDLFEKRHYIIEDLQTEKNKILSKPFIFPRGIFDKKPTFIKGVKVEDSPESFANWYQYGYQKDHQFQKFYDWKRDYSDVFLEHLGKPFINNGDRRTLGMEELKERIIIKQDLKIKKIKIQDLFLRLIAENLFQKVFKYSAKLPLSDFYLTQEERMEKENMAALQNVREEGDKSPNIIKDNFIWSKMIPYKKGQIIENAVKLKDIGKLNVLSLDDKVQTLLSYDDAKPWSKIALENEFSIGENSYEVIRREKLFKEIQQFESEILFRSGWDGINHPAQLEDNRNPKFKMYIVNGILRKSAGLYSQGEDIWFEYNADFNNLDADVLETKSELVQLAFLVTAIRNKFAHNQLPAKEFYFYIRAKYGFADEPSVALVYLNFTKYAINEFKKVMI

SEQ ID NO: 587 - protein, 1095 aa, Riemerella anatipestifer; identical to SEQ ID NO: 153

SEQ ID NO: 588 - protein, 948 aa, Riemerella anatipestifer
MFFSFHNAQRVIFKHLYKAFDASLRMVKEDYKAHFTVNLTRDFAHLNRKGKNKQDNPDFNRYRFEKDGFFTESGLLFFTNLFLDKRDAYWMLKKVSGFKASHKQREKMTTEVFCRSRILLPKLRLESRYDHNQMLLDMLSELSRCPKLLYEKLSEENKKHFQVEADGFLDEIEEEQNPFKDTLIRHQDRFPYFALRYLDLNESFKSIRFQVDLGTYHYCIYDKKIGDEQEKRHLTRTLLSFGRLQDFTEINRPQEWKALTKDLDYKETSNQPFISKTTPHYHITDNKIGFRLGTSKELYPSLEIKDGANRIAKYPYNSGFVAHAFISVHELLPLMFYQHLTGKSEDLLKETVRHIQRIYKDFEEERINTIEDLEKANQGRLPLGAFPKQMLGLLQNKQPDLSEKAKIKIEKLIAETKLLSHRLNTKLKSSPKLGKRREKLIKTGVLADWLVKDFMRFQPVAYDAQNQPIKSSKANSTEFWFIRRALALYGGEKNRLEGYFKQTNLIGNTNPHPFLNKFNWKACRNLVDFYQQYLEQREKFLEAIKHQPWEPYQYCLLLKVPKENRKNLVKGWEQGGISLPRGLFTEAIRETLSKDLTLSKPIRKEIKKHGRVGFISRAITLYFKEKYQDKHQSFYNLSYKLEAKAPLLKKEEHYEYWQQNKPQSPTESQRLELHTSDRWKDYLLYKRWQHLEKKLRLYRNQDIMLWLMTLELTKNHFKELNLNYHQLKLENLAVNVQEADAKLNPLNQTLPMVLPVKVYPTTAFGEVQYHETPIRTVYIREEQTKALKMGNFKALVKDRRLNGLFSFIKEENDTQKHPISQLRLRRELEIYQSLRVDAFKETLSLEEKLLNKHASLSSLENEFRTLLEEWKKKYAASSMVTDKHIAFIASVRNAFCHNQYPFYKETLHAPILLFTVAQPTTEEKDGLGIAEALLKVLREYCEIVKSQI

SEQ ID NO: 589 - protein, 948 aa, Riemerella anatipestifer
MFFSFHNAQRVIFKHLYKAFDASLRMVKEDYKAHFTVNLTRDFAHLNRKGKNKQDNPDFNRYRFEKDGFFTESGLLFFTNLFLDKRDAYWMLKKVSGFKASHKQREKMTTEVFCRSRILLPKLRLESRYDHNQMLLDMLSELSRCPKLLYEKLSEENKKHFQVEADGFLDEIEEEQNPFKDTLIRHQDRFPYFALRYLDLNESFKSIRFQVDLGTYHYCIYDKKIGDEQEKRHLTRTLLSFGRLQDFTEINRPQEWKALTKDLDYKETSNQPFISKTTPHYHITDNKIGFRLGTSKELYPSLEIKDGANRIAKYPYNSGFVAHAFISVHELLPLMFYQHLTGKSEDLLKETVRHIQRIYKDFEEERINTIEDLEKANQGRLPLGAFPKQMLGLLQNKQPDLSEKAKIKIEKLIAETKLLSHRLNTKLKSSPKLGKRREKLIKTGVLADWLVKDFMRFQPVAYDAQNQPIKSSKANSTEFWFIRRALALYGGEKNRLEGYFKQTNLIGNTNPHPFLNKFNWKACRNLVDFYQQYLEQREKFLEAIKNQPWEPYQYCLLLKIPKENRKNLVKGWEQGGISLPRGLFTEAIRETLSEDLMLSKPIRKEIKKHGRVGFISRAITLYFKEKYQDKHQSFYNLSYKLEAKAPLLKREEHYEYWQQNKPQSPTESQRLELHTSDRWKDYLLYKRWQHLEKKLRLYRNQDVMLWLMTLELTKNHFKELNLNYHQLKLENLAVNVQEADAKLNPLNQTLPMVLPVKVYPATAFGEVQYHKTPIRTVYIREEHTKALKMGNFKALVKDRRLNGLFSFIKEENDTQKHPISQLRLRRELEIYQSLRVDAFKETLSLEEKLLNKHTSLSSLENEFRALLEEWKKEYAASSMVTDEHIAFIASVRNAFCHNQYPFYKEALHAPIPLFTVAQPTTEEKDGLGIAEALLKVLREYCEIVKSQI

SEQ ID NO: 590 - protein, 950 aa, Riemerella anatipestifer
MFFSFHNAQRVIFKHLYKAFDASLRMVKEDYKAHFTVNLTRDFAHLNRKGKNKQDNPDFNRYRFEKDGFFTESGLLFFTNLFLDKRDAYWMLKKVSGFKASHKQSEKMTTEVFCRSRILLPKLRLESRYDHNQMLLDMLSELSRCPKLLYEKLSEKDKKCFQVEADGFLDEIEEEQNPFKDTLIRHQDRFPYFALRYLDLNESFKSIRFQVDLGTYHYCIYDKKIGYEQEKRHLTRTLLNFGRLQDFTEINRPQEWKALTKDLDYNETSNQPFISKTTPHYHITDNKIGFRLRTSKELYPSLEVKDGANRIAKYPYNSDFVAHAFISISVHELLPLMFYQHLTGKSEDLLKETVRHIQRIYKDFEEERINTIEDLEKANQGRLPLGAFPKQMLGLLQNKQPDLSEKAKIKIEKLIAETKLLSHRLNTKLKSSPKLGKRREKLIKTGVLADWLVKDFMRFQPVVYDAQNQPIKSSKANSTESRLIRRALALYGGEKNRLEGYFKQTNLIGNTNPHPFLNKFNWKACRNLVDFYQQYLEQREKFLEAIKHQPWEPYQYCLLLKVPKENRKNLVKGWEQGGISLPRGLFTEAIRETLSKDLTLSKPIRKEIKKHGRVGFISRAITLYFKEKYQDKHQSFYNLSYKLEAKAPLLKKEEHYEYWQQNKPQSPTESQRLELHTSDRWKDYLLYKRWQHLEKKLRLYRNQDIMLWLMTLELTKNHFKELNLNYHQLKLENLAVNVQEADAKLNPLNQTLPMVLPVKVYPTTAFGEVQYHETPIRTVYIREEQTKALKMGNFKALVKDRHLNGLFSFIKEENDTQKHPISQLRLRRELEIYQSLRVDAFKETLSLEEKLLNKHASLSSLENEFRTLLEEWKKKYAASSMVTDKHIAFIASVRNAFCHNQYPFYKETLHAPILLFTVAQPTTEEKDGLGIAEALLRVLREYCEIVKSQI

SEQ ID NO: 591 - protein, 1095 aa, Riemerella anatipestifer
MEKPLPPNVYTLKHKFFWGAFLNIARHNAFITICHINEQLGLTTPPNDDKIADVVCGTWNNILNNDHDLLKKSQLTELILKHFPFLAAMCYHPPKKEGKKKGSQKEQQKEKENEAQSQAEALNPSELIKVLKTLVKQLRTLRNYYSHHSHKKPDAEKDIFKHLYKAFDASLRMVKEDYKAHFTVNLTQDFAHLNRKGKNKQDNPDFDRYRFEKDGFFTESGLLFFTNLFLDKRDAYWMLKKVSGFKASHKQSEKMTTEVFCRSRILLPKLRLESRYDHNQMLLDMLSELSRYPKLLYEKLSEEDKKRFQVEADGFLDEIEEEQNPFKDTLIRHQDRFPYFALRYLDLNESFKSIRFQVDLGTYHYCIYDKKIGDEQEKRHLTRTLLSFGRLQDFTEINRPQEWKALTKDLDYKETSKQPFISKTTPHYHITDNKIGFRLGTSKELYPSLEVKDGANRIAQYPYNSDFVAHAFISVHELLPLMFYQHLTGKSEDLLKETVRHIQRIYKDFEEERINTIEDLEKANQGRLPLGAFPKQMLGLLQNKQPDLSEKAKIKIEKLIAETKLLSHRLNTKLKSSPKLGKRREKLIKTGVLADWLVKDFMRFQPVAYDAQNQPIESSKANSTEFQLIQRALALYGGEKNRLEGYFKQTNLIGNTNPHPFLNKFNWKACRNLVDFYQQYLEQREKFLEAIKNQPWEPYQYCLLLKIPKENRKNLVKGWEQGGISLPRGLFTEAIRETLSKDLTLSKPIRKEIKKHGRVGFISRAITLYFREKYQDDHQSFYDLPYKLEAKASPLPKKEHYEYWQQNKPQSPTELQRLELHTSDRWKDYLLYKRWQHLEKKLRLYRNQDVMLWLMTLELTKNHFKELNLNYHQLKLENLAVNVQEADAKLNPLNQTLPMVLPVKVYPATAFGEVQYQETPIRTVYIREEQTKALKMGNFKALVKDRRLNGLFSFIKEENDTQKHPISQLRLRRELEIYQSLRVDAFKETLNLEEKLLKKHTSLSSVENKFRILLEEWKKEYAASSMVTDEHIAFIASVRNAFCHNQYPFYEEALHAPIPLFTVAQQTTEEKDGLGIAEALLRVLREYCEIVKSQI

SEQ ID NO: 592 - protein, 1150 aa, Prevotella saccharolytica
MMEKENVQGSHIYYEPTDKCFWAAFYNLARHNAYLTIAHINSFVNSKKGINNDDKVLDIIDDWSKFDNDLLMGARLNKLILKHFPFLKAPLYQLAKRKTRKQQGKEQQDYEKKGDEDPEVIQEAIANAFKMANVRKTLHAFLKQLEDLRNHFSHYNYNSPAKKMEVKFDDGFCNKLYYVFDAALQMVKDDNRMNPEINMQTDFEHLVRLGRNRKIPNTFKYNFTNSDGTINNNGLLFFVSLFLEKRDAIWMQKKIKGFKGGTENYMRMTNEVFCRNRMVIPKLRLETDYDNHQLMFDMLNELVRCPLSLYKRLKQEDQDKFRVPIEFLDEDNEADNPYQENANSDENPTEETDPLKNTLVRHQHRFPYFVLRYFDLNEVFKQLRFQINLGCYHFSIYDKTIGERTEKRHLTRTLFGFDRLQNFSVKLQPEHWKNMVKHLDTEESSDKPYLSDAMPHYQIENEKIGIHFLKTDTEKKETVWPSLEVEEVSSNRNKYKSEKNLTADAFLSTHELLPMMFYYQLLSSEEKTRAAAGDKVQGVLQSYRKKIFDIYDDFANGTINSMQKLDERLAKDNLLRGNMPQQMLAILEHQEPDMEQKAKEKLDRLITETKKRIGKLEDQFKQKVRIGKRRADLPKVGSIADWLVNDMMRFQPAKRNADNTGVPDSKANSTEYRLLQEALAFYSAYKDRLEPYFRQVNLIGGTNPHPFLHRVDWKKCNHLLSFYHDYLEAKEQYLSHLSPADWQKHQHFLLLKVRKDIQNEKKDWKKSLVAGWKNGFNLPRGLFTESIKTWFSTDADKVQITDTKLFENRVGLIAKLIPLYYDKVYNDKPQPFYQYPFNINDRYKPEDTRKRFTAASSKLWNEKKMLYKNAQPDSSDKIEYPQYLDFLSWKKLERELRMLRNQDMMVWLMCKDLFAQCTVEGVEFADLKLSQLEVDVNVQDNLNVLNNVSSMILPLSVYPSDAQGNVLRNSKPLHTVYVQENNTKLLKQGNFKSLLKDRRLNGLFSFIAAEGEDLQQHPLTKNRLEYELSIYQTMRISVFEQTLQLEKAILTRNKTLCGNNFNNLLNSWSEHRTDKKTLQPDIDFLIAVRNAFSHNQYPMSTNTVMQGIEKFNIQTPKLEEKDGLGIASQLAKKTKDAASRLQNIINGGTN

SEQ ID NO: 593 - protein, 1151 aa, Prevotella saccharolytica; identical to SEQ ID NO: 155

SEQ ID NO: 594 - protein, 1127 aa, Prevotella buccae; identical to SEQ ID NO: 148

SEQ ID NO: 595 - protein, 1127 aa, Prevotella buccae; identical to SEQ ID NO: 148

SEQ ID NO: 596 - protein, 1127 aa, Prevotella buccae
MQKQDKLFVDRKKNAIFAFPKYITIMENQEKPEPIYYELTDKHFWAAFLNLARHNVYTTINHINRRLEIAELKDDGYMMDIKGSWNEQAKKLDKKVRLRDLIMKHFPFLEAAAYEITNSKSPNNKEQREKEQSEALSLNNLKNVLFIFLEKLQVLRNYYSHYKYSEESPKPIFETSLLKNMYKVFDANVRLVKRDYMHHENIDMQRDFTHLNRKKQVGRTKNIIDSPNFHYHFADKEGNMTIAGLLFFVSLFLDKKDAIWMQKKLKGFKDGRNLREQMTNEVFCRSRISLPKLKLENVQTKDWMQLDMLNELVRCPKSLYERLREKDRESFKVPFDIFSDDYDAEEEPFKNTLVRHQDRFPYFVLRYFDLNEIFEQLRFQIDLGTYHFSIYNKRIGDEDEVRHLTHHLYGFARIQDFAQQNQPEVWRKLVKDLDYFEASQEPYIPKTAPHYHLENEKIGIKFCSTHNNLFPSLKTEKTCNGRSKFNLGTQFTAEAFLSVHELLPMMFYYLLLTKDYSRKESADKVEGIIRKEISNIYAIYDAFANGEINSIADLTCRLQKTNILQGHLPKQMISILEGRQKDMEKEAERKIGEMIDDTQRRLDLLCKQTNQKIRIGKRNAGLLKSGKIADWLVNDMMRFQPVQKDQNNIPINNSKANSTEYRMLQRALALFGSENFRLKAYFNQMNLVGNDNPHPFLAETQWEHQTNILSFYRNYLEARKKYLKGLKPQNWKQYQHFLILKVQKTNRNTLVTGWKNSFNLPRGIFTQPIREWFEKHNNSKRIYDQILSFDRVGFVAKAIPLYFAEEYKDNVQPFYDYPFNIGNKLKPQKGQFLDKKERVELWQKNKELFKNYPSEKKKTDLAYLDFLSWKKFERELRLIKNQDIVTWLMFKELFNMATVEGLKIGEIHLRDIDTNTANEESNNILNRIMPMKLPVKTYETDNKGNILKERPLATFYIEETETKVLKQGNFKVLAKDRRLNGLLSFAETTDIDLEKNPITKLSVDHELIKYQTTRISIFEMTLGLEKKLINKYPTLPTDSFRNMLERWLQCKANRPELKNYVNSLIAVRNAFSHNQYPMYDATLFAEVKKFTLFPSVDTKKIELNIAPQLLEIVGKAIKEIEKSENKN

SEQ ID NO: 597 - protein, 1127 aa, Prevotella sp.
MQKQDKLFVDRKKNAIFAFPKYITIMENQEKPEPIYYELTDKHFWAAFLNLARHNVYTTINHINRRLEIAELKDDGYMMGIKGSWNEQAKKLDKKVRLRDLIMKHFPFLEAAAYEITNSKSPNNKEQREKEQSEALSLNNLKNVLFIFLEKLQVLRNYYSHYKYSEESPKPIFETSLLKNMYKVFDANVRLVKRDYMHHENIDMQRDFTHLNRKKQVGRTKNIIDSPNFHYHFADKEGNMTIAGLLFFVSLFLDKKDAIWMQKKLKGFKDGRNLREQMTNEVFCRSRISLPKLKLENVQTKDWMQLDMLNELVRCPKSLYERLREKDRESFKVPFDIFSDDYDAEEEPFKNTLVRHQDRFPYFVLRYFDLNEIFEQLRFQIDLGTYHFSIYNKRIGDEDEVRHLTHHLYGFARIQDFAPQNQPEEWRKLVKDLDHFETSQEPYISKTAPHYHLENEKIGIKFCSTHNNLFPSLKREKTCNGRSKFNLGTQFTAEAFLSVHELLPMMFYYLLLTKDYSRKESADKVEGIIRKEISNIYAIYDAFANNEINSIADLTCRLQKTNILQGHLPKQMISILEGRQKDMEKEAERKIGEMIDDTQRRLDLLCKQTNQKIRIGKRNAGLLKSGKIADWLVSDMMRFQPVQKDTNNAPINNSKANSTEYRMLQHALALFGSESSRLKAYFRQMNLVGNANPHPFLAETQWEHQTNILSFYRNYLEARKKYLKGLKPQNWKQYQHFLILKVQKTNRNTLVTGWKNSFNLPRGIFTQPIREWFEKHNNSKRIYDQILSFDRVGFVAKAIPLYFAEEYKDNVQPFYDYPFNIGNKLKPQKGQFLDKKERVELWQKNKELFKNYPSEKNKTDLAYLDFLSWKKFERELRLIKNQDIVTWLMFKELFKTTTVEGLKIGEIHLRDIDTNTANEESNNILNRIMPMKLPVKTYETDNKGNILKERPLATFYIEETETKVLKQGNFKVLAKDRRLNGLLSFAETTDIDLEKNPITKLSVDYELIKYQTTRISIFEMTLGLEKKLIDKYSTLPTDSFRNMLERWLQCKANRPELKNYVNSLIAVRNAFSHNQYPMYDATLFAEVKKFTLFPSVDTKKIELNIAPQLLEIVGKAIKEIEKSENKN

SEQ ID NO: 598 - protein, 1125 aa, Prevotella pallens
MKEEEKGKTPVVSTYNKDDKHFWAAFLNLARHNVYITVNHINKILGEGEINRDGYENTLEKSWNEIKDINKKDRLSKLIIKHFPFLEVTTYQRNSADTTKQKEEKQAEAQSLESLKKSFFVFIYKLRDLRNHYSHYKHSKSLERPKFEEDLQEKMYNIFDASIQLVKEDYKHNTDIKTEEDFKHLDRKGQFKYSFADNEGNITESGLLFFVSLFLEKKDAIWVQKKLEGFKCSNESYQKMTNEVFCRSRMLLPKLRLQSTQTQDWILLDMLNELIRCPKSLYERLREEDRKKFRVPIEIADEDYDAEQEPFKNALVRHQDRFPYFALRYFDYNEIFTNLRFQIDLGTYHFSIYKKQIGDYKESHHLTHKLYGFERIQEFTKQNRPDEWRKFVKTFNSFETSKEPYIPETTPHYHLENQKIGIRFRNDNDKIWPSLKTNSEKNEKSKYKLDKSFQAEAFLSVHELLPMMFYYLLLKTENTDNDNEIETKKKENKNDKQEKHKIEEIIENKITEIYALYDAFANGKINSIDKLEEYCKGKDIEIGHLPKQMIAILKSEHKDMATEAKRKQEEMLADVQKSLESLDNQINEEIENVERKNSSLKSGEIASWLVNDMMRFQPVQKDNEGNPLNNSKANSTEYQMLQRSLALYNKEEKPTRYFRQVNLIESSNPHPFLNNTEWEKCNNILSFYRSYLEAKKNFLESLKPEDWEKNQYFLMLKEPKTNCETLVQGWKNGFNLPRGIFTEPIRKWFMEHRKNITVAELKRVGLVAKVIPLFFSEEYKDSVQPFYNYLFNVGNINKPDEKNFLNCEERRELLRKKKDEFKKMTDKEKEENPSYLEFQSWNKFERELRLVRNQDIVTWLLCMELFNKKKIKELNVEKIYLKNINTNTTKKEKNTEEKNGEEKIIKEKNNILNRIMPMRLPIKVYGRENFSKNKKKKIRRNTFFTVYIEEKGTKLLKQGNFKALERDRRLGGLFSFVKTHSKAESKSNTISKSRVEYELGEYQKARIEIIKDMLALEETLIDKYNSLDTDNFHNMLTGWLKLKDEPDKASFQNDVDLLIAVRNAFSHNQYPMRNRIAFANINPFSLSSANTSEEKGLGIANQLKDKTHKTIEKIIEIEKPIETKE

SEQ ID NO: 599 - protein, 1125 aa, Prevotella pallens; identical to SEQ ID NO: 598

SEQ ID NO: 600 - protein, 1126 aa, Prevotella intermedia; identical to SEQ ID NO: 147

SEQ ID NO: 601 - protein, 1120 aa, Prevotella intermedia; identical to SEQ ID NO: 157

SEQ ID NO: 602 - protein, 1134 aa, Prevotella intermedia
MKMEDDKKTKESTNMLDNKHFWAAFLNLARHNVYITVNHINKVLELKNKKDQDIIIDNDQDILAIKTHWEKVNGDLNKTERLRELMTKHFPFLETAIYTKNKEDKEEVKQEKQAKAQSFDSLKHCLFLFLEKLQEARNYYSHYKYSESTKEPMLEKELLKKMYNIFDDNIQLVIKDYQHNKDINPDEDFKHLDRTEEEFNYYFTTNKKGNITASGLLFFVSLFLEKKDAIWMQQKLRGFKDNRESKKKMTHEVFCRSRMLLPKLRLESTQTQDWILLDMLNELIRCPKSLYERLQGEYRKKFNVPFDSADEDYDAEQEPFKNTLVRHQDRFPYFALRYFDYNEIFTNLRFQIDLGTYHFSIYKKLIGGQKEDRHLTHKLYGFERIQEFAKQNRTDEWKAIVKDFDTYETSEEPYISETAPHYHLENQKIGIRFRNDNDEIWPSLKTNGENNEKRKYKLDKQYQAEAFLSVHELLPMMFYYLLLKKEEPNNDKKNASIVEGFIKREIRDIYKLYDAFANGEINNIDDLEKYCEDKGIPKRHLPKQMVAILYDEHKDMAEEAKRKQKEMVKDTKKLLATLEKQTQGEIEDGGRNIRLLKSGEIARWLVNDMMRFQPVQKDNEGNPLNNSKANSTEYQMLQRSLALYNKEEKPTRYFRQVNLINSSNPHPFLKWTKWEECNNILSFYRSYLTKKIEFLNKLKPEDWEKNQYFLKLKEPKTNRETLVQGWKNGFNLPRGIFTEPIREWFKRHQNDSEEYEKVETLDRVGLVTKVIPLFFKKEDSKDKEEYLKKDAQKEINNCVQPFYGFPYNVGNIHKPDEKDFLPSEERKKLWGDKKYKFKGYKAKVKSKKLTDKEKEEYRSYLEFQSWNKFERELRLVRNQDIVTWLLCTELIDKLKVEGLNVEELKKLRLKDIDTDTAKQEKNNILNRVMPMQLPVTVYEIDDSHNIVKDRPLHTVYIEETKTKLLKQGNFKALVKDRRLNGLFSFVDTSSETELKSNPISKSLVEYELGEYQNARIETIKDMLLLEETLIEKYKTLPTDNFSDMLNGWLEGKDEADKARFQNDVKLLVAVRNAFSHNQYPMRNRIAFANINPFSLSSADTSEEKKLDIANQLKDKTHKIIKRIIEIEKPIETKE

SEQ ID NO: 603 - protein, 1132 aa, Prevotella intermedia; identical to SEQ ID NO: 166

SEQ ID NO: 604 - protein, 1133 aa, Prevotella intermedia
MEDDKKTTDSISYELKDKHFWAAFLNLARHNVYITVNHINKVLELKNKKDQDIIIDNDQDILAIKTHWEKVNGDLNKTERLRELMTKHFPFLETAIYSKNKEDKEEVKQEKQAKAQSFDSLKHCLFLFLEKLQETRNYYSHYKYSESTKEPMLEKELLKKMYNIFDDNIQLVIKDYQHNKDINPDEDFKHLDRTEEDFNYYFTRNKKGNITESGLLFFVSLFLEKKDAIWMQQKLRGFKDNRESKKKMTHEVFCRSRMLLPKLRLESTQTQDWILLDMLNELIRCPKSLYERLQGEDREKFKVPFDPADEDYDAEQEPFKNTLVRHQDRFPYFALRYFDYNEIFTNLRFQIDLGTFHFSIYKKLIGGQKEDRHLTHKLYGFERIQEFAKQNRPDEWKAIVKDLDTYETSNERYISETTPHYHLENQKIGIRFRNDNDEIWPSLKTNGENNEKSKYKLDKQYQAEAFLSVHELLPMMFYYLLLKKEEPNNDKKNASIVEGFIKREIRDMYKLYDAFANGEINNIDDLEKYCEDKGIPKRHLPKQMVAILYDEHKDMVKEAKRKQRKMVKDTEKLLAALEKQTQEKTEDGGRNIRLLKSGEIARWLVNDMMRFQPVQKDNEGNPLNNSKANSTEYQMLQRSLALYNKEEKPTRYFRQVNLINSSNPHPFLKWTKWEECNNILSFYRSYLTKKIEFLNKLKPEDWEKNQYFLKLKEPKTNRETLVQGWKNGFNLPRGIFTEPIREWFKRHQNDSKEYEKVEALDRVGLVTKVIPLFFKKEDSKDKEEDLKKDAQKEINNCVQPFYSFPYNVGNIHKPDEKDFLHREERIELWDKKKDKFKGYKAKVKSKKLTDKEKEEYRSYLEFQSWNKFERELRLVRNQDIVTWLLCTELIDKLKVEGLNVEELKKLRLKDIDTDTAKQEKNNILNRVMPMQLPVTVYEIDDSHNIVKDRPLHTVYIEETKTKLLKQGNFKALVKDRRLNGLFSFVDTSSEAELKSNPISKSLVEYELGEYQNARIETIKDMLLLEETLIEKYKNLPTDNFSDMLNGWLEGKDEADKARFQNDVKLLVAVRNAFSHNQYPMRNRIAFANINPFSLSSADTSEEKKLDIANQLKDKTHKIIKRIIEIEKPIETKE

SEQ ID NO: 605 - protein, 1125 aa, Prevotella intermedia
MKMEDDKKTTESTNMLDNKHFWAAFLNLARHNVYITVNHINKVLELKNKKDQDIIIDNDQDILAIKTHWEKVNGDLNKTERLRELMTKHFPFLETAIYTKNKEDKEEVKQEKQAEAQSLESLKDCLFLFLEKLQEARNYYSHYKYSESTKEPMLEEGLLEKMYNIFDDNIQLVIKDYQHNKDINPDEDFKHLDRKGQFKYSFADNEGNITESGLLFFVSLFLEKKDAIWMQQKLTGFKDNRESKKKMTHEVFCRRRMLLPKLRLESTQTQDWILLDMLNELIRCPKSLYERLQGEYRKKFNVPFDSADEDYDAEQEPFKNTLVRHQDRFPYFALRYFDYNEIFTNLRFQIDLGTYHFSIYKKLIGGQKEDRHLTHKLYGFERIQEFAKQNRPDEWKALVKDLDTYETSNERYISETTPHYHLENQKIGIRFRNGNKEIWPSLKTNGENNEKSKYKLDKPYQAEAFLSVHELLPMMFYYLLLKKEEPNNDKKNASIVEGFIKREIRDMYKLYDAFANGEINNIGDLEKYCEDKGIPKRHLPKQMVAILYDEPKDMVKEAKRKQKEMVKDTKKLLATLEKQTQEEIEDGGRNIRLLKSGEIARWLVNDMMRFQPVQKDNEGNPLNNSKANSTEYQMLQRSLALYNKEEKPTRYFRQVNLINSSNPHPFLKWTKWEECNNILSFYRNYLTKKIEFLNKLKPEDWEKNQYFLKLKEPKTNRETLVQGWKNGFNLPRGIFTEPIREWFKRHQNDSKEYEKVEALKRVGLVTKVIPLFFKEEYFKEDAQKEINNCVQPFYSFPYNVGNIHKPDEKDFLPSEERKKLWGDKKDKFKGYKAKVKSKKLTDKEKEEYRSYLEFQSWNKFERELRLVRNQDIVTWLLCTELIDKMKVEGLNVEELQKLRLKDIDTDTAKQEKNNILNRIMPMQLPVTVYEIDDSHNIVKDRPLHTVYIEETKTKLLKQGNFKALVKDRRLNGLFSFVDTSSKAELKDKPISKSVVEYELGEYQNARIETIKDMLLLEKTLIKKYEKLPTDNFSDMLNGWLEGKDESDKARFQNDVKLLVAVRNAFSHNQYPMRNRIAFANINPFSLSSADISEEKKLDIANQLKDKTHKIIKKIIEIEKPIETKE

SEQ ID NO: 606 - protein, 1124 aa, Prevotella aurantiaca; identical to SEQ ID NO: 154

SEQ ID NO: 607 - protein, 1139 aa, Prevotella pleuritidis
MENDKRLEESACYTLNDKHFWAAFLNLARHNVYITVNHINKTLELKNKKNQEIIIDNDQDILAIKTHWAKVNGDLNKTDRLRELMIKHFPFLEAAIYSNNKEDKEEVKEEKQAKAQSFKSLKDCLFLFLEKLQEARNYYSHYKYSESSKEPEFEEGLLEKMYNTFDASIRLVKEDYQYNKDIDPEKDFKHLERKEDFNYLFTDKDNKGKITKNGLLFFVSLFLEKKDAIWMQQKFRGFKDNRGNKEKMTHEVFCRSRMLLPKIRLESTQTQDWILLDMLNELIRCPKSLYERLQGAYREKFKVPFDSIDEDYDAEQEPFRNTLVRHQDRFPYFALRYFDYNEIFKNLRFQIDLGTYHFSIYKKLIGGKKEDRHLTHKLYGFERIQEFTKQNRPDKWQAIIKDLDTYETSNERYISETTPHYHLENQKIGIRFRNDNNDIWPSLKTNGEKNEKSKYNLDKPYQAEAFLSVHELLPMMFYYLLLKMENTDNDKEDNEVGTKKKGNKNNKQEKHKIEEIIENKIKDIYALYDAFTNGEINSIDELAEQREGKDIEIGHLPKQLIVILKNKSKDMAEKANRKQKEMIKDTKKRLATLDKQVKGEIEDGGRNIRLLKSGEIARWLVNDMMRFQPVQKDNEGKPLNNSKANSTEYQMLQRSLALYNKEEKPTRYFRQVNLIKSSNPHPFLEDTKWEECYNILSFYRNYLKAKIKFLNKLKPEDWKKNQYFLMLKEPKTNRKTLVQGWKNGFNLPRGIFTEPIKEWFKRHQNDSEEYKKVEALDRVGLVAKVIPLFFKEEYFKEDAQKEINNCVQPFYSFPYNVGNIHKPEEKNFLHCEERRKLWDKKKDKFKGYKAKEKSKKMTDKEKEEHRSYLEFQSWNKFERELRLVRNQDILTWLLCTKLIDKLKIDELNIEELQKLRLKDIDTDTAKKEKNNILNRVMPMRLPVTVYEIDKSFNIVKDKPLHTVYIEETGTKLLKQGNFKALVKDRRLNGLFSFVKTSSEAESKSKPISKLRVEYELGAYQKARIDIIKDMLALEKTLIDNDENLPTNKFSDMLKSWLKGKGEANKARLQNDVGLLVAVRNAFSHNQYPMYNSEVFKGMKLLSLSSDIPEKEGLGIAKQLKDKIKETIERIIEIEKEIRN

SEQ ID NO: 608 - protein, 1116 aa, Prevotella pleuritidis
MENDKRLEESTCYTLNDKHFWAAFLNLARHNVYITINHINKLLEIRQIDNDEKVLDIKALWQKVDKDINQKARLRELMIKHFPFLEAAIYSNNKEDKEEVKEEKQAKAQSFKSLKDCLFLFLEKLQEARNYYSHYKSSESSKEPEFEEGLLEKMYNTFGVSIRLVKEDYQYNKDIDPEKDFKHLERKEDFNYLFTDKDNKGKITKNGLLFFVSLFLEKKDAIWMQQKLRGFKDNRGNKEKMTHEVFCRSRMLLPKIRLESTQTQDWILLDMLNELIRCPKSLYERLQGAYREKFKVPFDSIDEDYDAEQEPFRNTLVRHQDRFPYFALRYFDYNEIFKNLRFQIDLGTYHFSIYKKLIGDNKEDRHLTHKLYGFERIQEFAKQKRPNEWQALVKDLDIYETSNEQYISETTPHYHLENQKIGIRFKNKKDKIWPSLETNGKENEKSKYNLDKSFQAEAFLSIHELLPMMFYDLLLKKEEPNNDEKNASIVEGFIKKEIKRMYAIYDAFANEEINSKEGLEEYCKNKGFQERHLPKQMIAILTNKSKNMAEKAKRKQKEMIKDTKKRLATLDKQVKGEIEDGGRNIRLLKSGEIARWLVNDMMRFQSVQKDKEGKPLNNSKANSTEYQMLQRSLALYNKEQKPTPYFIQVNLIKSSNPHPFLEETKWEECNNILSFYRSYLEAKKNFLESLKPEDWKKNQYFLMLKEPKTNRKTLVQGWKNGFNLPRGIFTEPIKEWFKRHQNDSEEYKKVEALDRVGLVAKVIPLFFKEEYFKEDAQKEINNCVQPFYSFPYNVGNIHKPEEKNFLHCEERRKLWDKKKDKFKGYKAKEKSKKMTDKEKEEHRSYLEFQSWNKFERELRLVRNQDIVTWLLCTELIDKLKIDELNIEELQKLRLKDIDTDTAKKEKNNILNRIMPMQLPVTVYEIDKSFNIVKDKPLHTIYIEETGTKLLKQGNFKALVKDRRLNGLFSFVKTSSEAESKSKPISKLRVEYELGAYQKARIDIIKDMLALEKTLIDNDENLPTNKFSDMLKSWLKGKGEANKARLQNDVDLLVAIRNAFSHNQYPMYNSEVFKGMKLLSLSSDIPEKEGLGIAKQLKDKIKETIERIIEIEKEIRN

SEQ ID NO: 609 - protein, 1133 aa, Prevotella falsenii
MKNDNNSTKSTDYTLGDKHFWAAFLNLARHNVYITVNHINKVLELKNKKDQEIIIDNDQDILAIKTLWGKVDTDINKKDRLRELIMKHFPFLEAATYQQSSTNNTKQKEEEQAKAQSFESLKDCLFLFLEKLREARNYYSHYKHSKSLEEPKLEEKLLENMYNIFDTNVQLVIKDYEHNKDINPEEDFKHLGRAEGEFNYYFTRNKKGNITESGLLFFVSLFLEKKDAIWAQTKIKGFKDNRENKQKMTHEVFCRSRMLLPKLRLESTQTQDWILLDMLNELIRCPKSLYKRLQGEKREKFRVPFDPADEDYDAEQEPFKNTLVRHQDRFPYFALRYFDYNEIFTNLRFQIDLGTYHFSIYKKQIGDKKEDRHLTHKLYGFERIQEFAKENRPDEWKALVKDLDTFEESNEPYISETTPHYHLENQKIGIRNKNKKKKKTIWPSLETKTTVNERSKYNLGKSFKAEAFLSVHELLPMMFYYLLLNKEEPNNGKINASKVEGIIEKKIRDIYKLYGAFANEEINNEEELKEYCEGKDIAIRHLPKQMIAILKNEYKDMAKKAEDKQKKMIKDTKKRLAALDKQVKGEVEDGGRNIKPLKSGRIASWLVNDMMRFQPVQRDRDGYPLNNSKANSTEYQLLQRTLALFGSERERLAPYFRQMNLIGKDNPHPFLKDTKWKEHNNILSFYRSYLEAKKNFLGSLKPEDWKKNQYFLKLKEPKTNRETLVQGWKNGFNLPRGIFTEPIREWFIRHQNESEEYKKVKDFDRIGLVAKVIPLFFKEDYQKEIEDYVQPFYGYPFNVGNIHNSQEGTFLNKKEREELWKGNKTKFKDYKTKEKNKEKTNKDKFKKKTDEEKEEFRSYLDFQSWKKFERELRLVRNQDIVTWLLCMELIDKLKIDELNIEELQKLRLKDIDTDTAKKEKNNILNRIMPMELPVTVYETDDSNNIIKDKPLHTIYIKEAETKLLKQGNFKALVKDRRLNGLFSFVETSSEAELKSKPISKSLVEYELGEYQRARVEIIKDMLRLEETLIGNDEKLPTNKFRQMLDKWLEHKKETDDTDLKNDVKLLTEVRNAFSHNQYPMRDRIAFANIKPFSLSSANTSNEEGLGIAKKLKDKTKETIDRIIEIEEQTATKR

SEQ ID NO: 610 - protein, 1175 aa, Porphyromonas gulae
MTEQSERPYNGTYYTLEDKHFWAAFLNLARHNAYITLTHIDRQLAYSKADITNDQDVLSFKALWKNLDNDLERKSRLRSLILKHFSFLEGAAYGKKLFESKSSGNKSSKNKELTKKEKEELQANALSLDNLKSILFDFLQKLKDFRNYYSHYRHSGSSELPLFDGNMLQRLYNVFDVSVQRVKRDHEHNDKVDPHRHFNHLVRKGKKDRYGHNDNPSFKHHFVDSEGMVTEAGLLFFVSLFLEKRDAIWMQKKIRGFKGGTETYQQMTNEVFCRSRISLPKLKLESLRMDDWMLLDMLNELVRCPKPLYDRLREDDRACFRVPVDILPDEDDTDGGGEDPFKNTLVRHQDRFPYFALRYFDLKKVFTSLRFHIDLGTYHFAIYKKMIGEQPEDRHLTRNLYGFGRIQDFAEEHRPEEWKRLVRDLDYFETGDKPYISQTSPHYHIEKGKIGLRFMPEGQHLWPSPEVGTTRTGRSKYAQDKRLTAEAFLSVHELMPMMFYYFLLREKYSEEVSAEKVQGRIKRVIEDVYAIYDAFARDEINTLKELDACLADKGIRRGHLPKQMIAILSQEHKNMEEKVRKKLQEMIADTDHRLDMLDRQTDRKIRIGRKNAGLPKSGVIADWLVRDMMRFQPVAKDASGKPLNNSKANSTEYRMLQRALALFGGEKERLTPYFRQMNLTGGNNPHPFLHDTRWESHTNILSFYRSYLRARKAFLERIGRSDRMENRPFLLLKEPKTDRQTLVAGWKSEFHLPRGIFTEAVRDCLIEMGYDEVGSYREVGFMAKAVPLYFERACEDRVQPFYDSPFNVGNSLKPKKGRFLSKEERAEEWERGKERFRDLEAWSHSAARRIEDAFAGIEYASPGNKKKIEQLLRDLSLWEAFESKLKVRADKINLAKLKKEILEAQEHPYHDFKSWQKFERELRLVKNQDIITWMMCRDLMEENKVEGLDTGTLYLKDIRTNVQEQGSLNVLNHVKPMRLPVVVYRADSRGHVHKEEAPLATVYIEERDTKLLKQGNFKSFVKDRRLNGLFSFVDTGGLAMEQYPISKLRVEYELAKYQTARVCAFEQTLELEESLLTRYPHLPDKNFRKMLESWSDPLLAKWPELHGKVRLLIAVRNAFSHNQYPMYDEAVFSSIRKYDPSSPDAIEERMGLNIAHRLSEEVKQAKETVERIIQA

SEQ ID NO: 611 - protein, 1175 aa, Porphyromonas sp.; identical to SEQ ID NO: 165

SEQ ID NO: 612 - protein, 1174 aa, Porphyromonas gulae
MTEQSERPYNGTYYTLEDKHFWAAFLNLARHNAYITLTHIDRQLAYSKADITNDQDVLSFKALWKNLDNDLERKSRLRSLILKHFSFLEGAAYGKKLFESKSSGNKSSKNKELTKKEKEELQANALSLDNLKSILFDFLQKLKDFRNYYSHYRHSGSSELPLFDGNMLQRLYNVFDVSVQRVKRDHEHNDKVDPHYHFNHLVRKGKKDRYGHNDNPSFKHHFVDSEGMVTEAGLLFFVSLFLEKRDAIWMQKKIRGFKGGTGPYEQMTNEVFCRSRISLPKLKLESLRTDDWMLLDMLNELVRCPKPLYDRLREKDRACFRVPVDILPDEDDTDGGGEDPFKNTLVRHQDRFPYFALRYFDLKKVFTSLRFHIDLGTYHFAIYKKMIGEQPEDRHLTRNLYGFGRIQDFAEEHRPEEWKRLVRDLDYLETGDKPYISQTTPHYHIEKGKIGLRFVPEGQHLWPSPEVGTTRTGRSKCAQDKRLTAEAFLSVHELMPMMFYYFLLREKYSEEVSAEKVQGRIKRVIEDVYAIYDAFARDEINTLKELDTCLADKGIRRGHLPKQMITILSQERKDMKEKIRKKLQEMIADTDHRLDMLDRQTDRKIRIGRKNAGLPKSGVIADWLVRDMMRFQPVAKDASGKPLNNSKANSTEYRMLQRALALFGGEKERLTPYFRQMNLTGGNNPHPFLHETRWESHTNILSFYRSYLRARKAFLERIGRSDRVENCPFLLLKEPKTDRQTLVAGWKDEFHLPRGIFTEAVRDCLIEMGYDEVGSYREVGFMAKAVPLYFERACEDRVQPFYDSPFNVGNSLKPKKGRFLSKEDRAEEWERGMERFRDLEAWSHSAARRIKDAFAGIEYASPGNKKKIEQLLRDLSLWEAFESKLKVRADKINLAKLKKEILEAQEHPYHDFKSWQKFERELRLVKNQDIITWMMCRDLMEENKVEGLDTGTLYLKDIRPNVQEQGSLNVLNRVKPMRLPVVVYRADSRGHVHKEAPLATVYIEERNTKLLKQGNFKSFVKDRRLNGLFSFVDTGGLAMEQYPISKLRVEYELAKYQTARVCVFELTLRLEESLLSRYPHLPDESFREMLESWSDPLLAKWPELHGKVRLLIAVRNAFSHNQYPMYDEAVFSSIRKYDPSSPDAIEERMGLNIAHRLSEEVKQAKETVERIIQA

SEQ ID NO: 613 - protein, 1175 aa, Porphyromonas gulae
MTEQSERPYNGTYYTLEDKHFWAAFLNLARHNAYITLTHIDRQLAYSKADITNDQDVLSFKALWKNFDNDLERKSRLRSLILKHFSFLEGAAYGKKLFESKSSGNKSSKNKELTKKEKEELQANALSLDNLKSILFDFLQKLKDFRNYYSHYRHSESSELPLFDGNMLQRLYNVFDVSVQRVKRDHEHNDKVDPHRHFNHLVRKGKKDRYGHNDNPSFKHHFVDGEGMVTEAGLLFFVSLFLEKRDAIWMQKKIRGFKGGTETYQQMTNEVFCRSRISLPKLKLESLRTDDWMLLDMLNELVRCPKPLYDRLREDDRACFRVPVDILPDEDDTDGGGEDPFKNTLVRHQDRFPYFALRYFDLKKVFTSLRFHIDLGTYHFAIYKKMIGEQPEDRHLTRNLYGFGRIQDFAEEHRPEEWKRLVRDLDYFETGDKPYISQTSPHYHIEKGKIGLRFMPEGQHLWPSPEVGTTRTGRSKYAQDKRLTAEAFLSVHELMPMMFYYFLLREKYSEEVSAEKVQGRIKRVIEDVYAIYDAFARDEINTLKELDACLADKGIRRGHLPKQMIAILSQEHKDMEEKIRKKLQEMIADTDHRLDMLDRQTDRKIRIGRKNAGLPKSGVIADWLVRDMMRFQPVAKDTSGKPLNNSKANSTEYRMLQRALALFGGEKKRLTPYFRQMNLTGGNNPHPFLHETRWESHTNILSFYRSYLRARKAFLERIGRSDRMENRPFLLLKEPKTDRQTLVAGWKSEFHLPRGIFTEAVRDCLIEMGYDEVGSYREVGFMAKAVPLYFERACEDRVQPFYDSPFNVGNSLKPKKGRFLSKEERAEEWERGKERFRDLEAWSHSAARRIEDAFAGIEYASPGNKKKIEQLLRDLSLWEAFESKLKVRADKINLAKLKKEILEAQEHPYHDFKSWQKFERELRLVKNQDIITWMMCRDLMEENKVEGLDTGTLYLKDIRPNVQEQGSLNVLNRVKPMRLPVVVYRADSRGHVHKEEAPLATVYIEERDTKLLKQGNFKSFVKDRRLNGLFSFVDTGGLAMEQYPISKLRVEYELAKYQTARVCVFELTLRLEESLLTRYPHLPDESFRKMLESWSDPLLAKWPELHGKVRLLIAVRNAFSHNQYPMYDEAVFSSIRKYDPSSPDAIEERMGLNIAHRLSEEVKQAKETVERIIQV

SEQ ID NO: 614 - protein, 1175 aa, Porphyromonas gulae
MTEQSERPYNGTYYTLEDKHFWAAFLNLARHNAYITLTHIDRQLAYSKADITNDQDVLSFKALWKNFDNDLERKSRLRSLILKHFSFLEGAAYGKKLFESKSSGNKSSKNKELTKKEKEELQANALSLDNLKSILFDFLQKLKDFRNYYSHYRHSESSELPLFDGNMLQRLYNVFDVSVQRVKRDHEHNDKVDPHRHFNHLVRKGKKDRYGHNDNPSFKHHFVDSEGMVTEAGLLFFVSLFLEKRDAIWMQKKIRGFKGGTETYQQMTNEVFCRSRISLPKLKLESLRTDDWMLLDMLNELVRCPKPLYDRLREKDRARFRVPVDILPDEDDTDGGGEDPFKNTLVRHQDRFPYFALRYFDLKKVFTSLRFHIDLGTYHFAIYKKMIGEQPEDRHLTRNLYGFGRIQDFAEEHRPEEWKRLVRDLDYFETGDKPYISQTTPHYHIEKGKIGLRFMPEGQHLWPSPEVGTTRTGRSKYAQDKRLTAEAFLSVHELMPMMFYYFLLREKYSEEVSAEKVQGRIKRVIEDVYAIYDAFARDEINTLKELDACLADKGIRRGHLPKQMIAILSQEHKDMEEKIRKKLQEMIADTDHRLDMLDRQTDRKIRIGRKNAGLPKSGVIADWLVRDMMRFQPVAKDTSGKPLNNSKANSTEYRMLQRALALFGGEKKRLTPYFRQMNLTGGNNPHPFLHETRWESHTNILSFYRSYLRARKAFLERIGRSDRMENRPFLLLKEPKTDRQTLVAGWKSEFHLPRGIFTEAVRDCLIEMGYDEVGSYREVGFMAKAVPLYFERACEDRVQPFYDSPFNVGNSLKPKKGRFLSKEERAEEWERGKERFRDLEAWSHSAARRIEDAFAGIEYASPGNKKKIEQLLRDLSLWEAFESKLKVRADKINLAKLKKEILEAQEHPYHDFKSWQKFERELRLVKNQDIITWMMCRDLMEENKVEGLDTGTLYLKDIRPNVQEQGSLNVLNRVKPMRLPVVVYRADSRGHVHKEEAPLATVYIEERDTKLLKQGNFKSFVKDRRLNGLFSFVDTGGLAMEQYPISKLRVEYELAKYQTARVCVFELTLRLEESLLTRYPHLPDESFRKMLESWSDPLLAKWPELHGKVRLLIAVRNAFSHNQYPMYDEAVFSSIRKYDPSSPDAIEERMGLNIAHRLSEEVKQAKETVERIIQV

SEQ ID NO: 615 - protein, 1175 aa, Porphyromonas gulae; identical to SEQ ID NO: 159

SEQ ID NO: 616 - protein, 1119 aa, Porphyromonas gulae
MTEQSERPYNGTYYTLEDKHFWAAFLNLARHNAYITLTHIDRQLAYSKADITNDQDVLSFKALWKNLDNDLERKSRLRSLILKHFSFLEGAAYGKKLFESKSSGNKSSKNKELTKKEKEELQANALSLDNLKSILFDFLQKLKDFRNYYSHYRHSGSSELPLFDGNMLQRLYNVFDVSVQRVKRDHEHNDKVDPHRHFNHLVRKGKKDRYGHNDNPSFKHHFVDGEGMVTEAGLLFFVSLFLEKRDAIWMQKKIRGFKGGTETYQQMTNEVFCRSRISLPKLKLESLRTDDWMLLDMLNELVRCPKPLYDRLREKDRARFRVPVDILPDEDDTDGGGEDPFKNTLVRHQDRFPYFALRYFDLKKVFTSLRFHIDLGTYHFAIYKKVIGEQPEDRHLTRNLYGFGRIQDFAEEHRPEEWKRLVRDLDYFETGDKPYISQTTPHYHIEKGKIGLRFVPEGQHLWPSPEVGTTRTGRSKYAQDKRLTAEAFLSVHELMPMMFYYFLLREKYSEEVSAEKVQGRIKRVIEDVYAIYDAFARDEINTRDELDACLADKGIRRGHLPKQMIGILSQEHKNMEEKVRKKLQEMIADTDHRLDMLDRQTDRKIRIGRKNAGLPKSGVIADWLVRDMMRFQPVAKDTSGKPLNNSKANSTEYRMLQRALALFGGEKERLTPYFRQMNLTGGNNPHPFLDETRWESHTNILSFYRSYLRARKAFLERIGRSDRVENRPFLLLKEPKTDRQTLVAGWKSEFHLPRGIFTEAVRDCLIEMGYDEVGSYKEVGFMAKAVPLYFERACKDRVQPFYDSPFNVGNSLKPKKGRFLSKEKRAEEWESGKERFRLAKLKKEILEAQEHPYHDFKSWQKFERELRLVKNQDIITWMMCRDLMEENKVEGLDTGTLYLKDIRPNVQEQGSLNVLNRVKPMRLPVVVYRADSRGHVHKEEAPLATVYIEERDTKLLKQGNFKSFVKDRRLNGLFSFVDTGGLAMEQYPISKLRVEYELAKYQTARVCVFELTLRLEESLLSRYPHLPDESFREMLESWSDPLLAKWPELHGKVRLLIAVRNAFSHNQYPMYDEAVFSSIRKYDPSSPDAIEERMGLNIAHRLSEEVKQAKETVERIIQA

SEQ ID NO: 617 - protein, 1119 aa, Porphyromonas gulae
MTEQSERPYNGTYYTLEDKHFWAAFLNLARHNAYITLTHIDRQLAYSKADITNDQDVLSFKALWKNFDNDLERKSRLRSLILKHFSFLEGAAYGKKLFESKSSGNKSSKNKELTKKEKEELQANALSLDNLKSILFDFLQKLKDFRNYYSHYRHSGSSELPLFDGNMLQRLYNVFDVSVQRVKRDHEHNDKVDPHYHFNHLVRKGKKDRYGHNDNPSFKHHFVDSEGMVTEAGLLFFVSLFLEKRDAIWMQKKIRGFKGGTGPYEQMTNEVFCRSRISLPKLKLESLRTDDWMLLDMLNELVRCPKPLYDRLREKDRACFRVPVDILPDEDDTDGGGEDPFKNTLVRHQDRFPYFALRYFDLKKVFTSLRFHIDLGTYHFAIYKKMIGEQPEDRHLTRNLYGFGRIQDFAEEHRPEEWKRLVRDLDYFETGDKPYISQTTPHYHIEKGKIGLRFMPEGQHLWPSPEVGTTRTGRSKYAQDKRLTAEAFLSVHELMPMMFYYFLLREKYSEEVSAEKVQGRIKRVIKDVYAIYDAFARDEINTLKELDACSADKGIRRGHLPKQMIGILSQEHKNMEEKVRKKLQEMIADTDHRLDMLDRQTDRKIRIGRKNAGLPKSGVIADWLVRDMMRFQPVAKDTSGKPLNNSKANSTEYRMLQRALALFGGEKERLTPYFRQMNLTGGNNPHPFLDETRWESHTNILSFYRSYLRARKAFLERIGRSDRVENRPFLLLKEPKNDRQTLVAGWKSEFHLPRGIFTEAVRDCLIEMGYDEVGSYKEVGFMAKAVPLYFERACKDRVQPFYDSPFNVGNSLKPKKGRFLSKEKRAEEWESGKERFRLAKLKKEILEAKEHPYHDFKSWQKFERELRLVKNQDIITWMMCRDLMEENKVEGLDTGTLYLKDIRTDVHEQGSLNVLNRVKPMRLPVVVYRADSRGHVHKEQAPLATVYIEERDTKLLKQGNFKSFVKDRRLNGLFSFVDTGGLAMEQYPISKLRVEYELAKYQTARVCAFEQTLELEESLLTRYPHLPDENFREMLESWSDPLLGKWPDLHGKVRLLIAVRNAFSHNQYPMYDEAVFSSIRKYDPSSPDAIEERMGLNIAHRLSEEVKQAKETVERIIQA

SEQ ID NO: 618 - protein, 1119 aa, Porphyromonas gulae
MTEQSERPYNGTYYTLEDKHFWAAFLNLARHNAYITLTHIDRQLAYSKADITNDEDILFFKGQWKNLDNDLERKSRLRSLILKHFSFLEGAAYGKKFFESKSSGNKSSKNKELTKKEKEELQANALSLDNLKSILFDFLQKLKDFRNYYSHYRHSGSSELPLFDGNMLQRLYNVFDVSVQRVKRDHEHNDEVDPHYHFNHLVRKGKKDRYGHNDNPSFKHHFVDGEGMVTEAGLLFFVSLFLEKRDAIWMQKKIRGFKGGTEPYEQMTNEVFCRSRISLPKLKLESLRTDDWMLLDMLNELVRCPKPLYDRLREKDRACFRVPVDILPDEDDTDGGGEDPFKNTLVRHQDRFPYFALRYFDLKKVFTSLRFHIDLGTYHFAIYKKMIGEQPEDRHLTRNLYGFGRIQDFAEEHRPEEWKRLVRDLDYFETGDKPYISQTTPHYHIEKGKIGLRFVPEGQHLWPSPEVGTTRTGRSKYAQDKRLTAEAFLSVHELMPMMFYYFLLREKYSEEVSAEKVQGRIKRVIEDVYAIYDAFARDEINTLKELDACLADKGIRRGHLPKQMIGILSQERKDMEEKVRKKLQEMIADTDHRLDMLDRQTDRKIRIGRKNAGLPKSGVIADWLVRDMMRFQPVAKDTSGKPLNNSKANSTEYRMLQRALALFGGEKERLTPYFRQMNLTGGNNPHPFLHETRWESHTNILSFYRSYLRARKAFLERIGRSDRVENCPFLLLKEPKTDRQTLVAGWKGEFHLPRGIFTEAVRDCLIEMGYDEVGSYREVGFMAKAVPLYFERACEDRVQPFYDSPFNVGNSLKPKKGRFLSKEKRAEEWESGKERFRLAKLKKEILEAQEHPYHDFKSWQKFERELRLVKNQDIITWMMCRDLMEENKVEGLDTGTLYLKDIRPNVQEQGSLNVLNRVKPMRLPVVVYRADSRGHVHKEEAPLATVYIEERDTKLLKQGNFKSFVKDRRLNGLFSFVDTGALAMEQYPISKLRVEYELAKYQTARVCAFEQTLELEESLLTRYPHLPDESFREMLESWSDPLLTKWPELHGKVRLLIAVRNAFSHNQYPMYDEAVFSSIWKYDPSSPDAIEERMGLNIAHRLSEEVKQAKETIERIIQA

SEQ ID NO: 619 - protein, 1119 aa, Porphyromonas gingivalis
MTEQNEKPYNGTYYTLEDKHFWAAFFNLARHNAYITLAHIDRQLAYSKADITNDEDILFFKGQWKNLDNDLERKARLRSLILKHFSFLEGAAYGKKLFESQSSGNKSSKNKELTKKEKEELQANALSLDNLKSILFDFLQKLKDFRNYYSHYRHPESSELPLFDGNMLQRLYNVFDVSVQRVKRDHEHNDKVDPHRHFNHLVRKGKKDRYGNNDNPFFKHHFVDREGTVTEAGLLFFVSLFLEKRDAIWMQKKIRGFKGGTETYQQMTNEVFCRSRISLPKLKLESLRTDDWMLLDMLNELVRCPKSLYDRLREEDRARFRVPVDILSDEEDTDGAEEDPFKNTLVRHQDRFPYFALRYFDLKKVFTSLRFQIDLGTYHFAIYKKNIGEQPEDRHLTRNLYGFGRIQDFAEEHRPEEWKRLVRDLDYFETGDKPYITQTTPHYHIEKGKIGLRFVPEGQHLWPSPEVGATRTGRSKYAQDKRFTAEAFLSAHELMPMMFYYFLLREKYSEEASAERVQGRIKRVIEDVYAVYDAFARDEINTRDELDACLADKGIRRGHLPRQMIGILSQEHKDMEEKIRKKLQEMMADTDHRLDMLDRQTDRKIRIGRKNAGLPKSGVIADWLVRDMMRFQPVAKDTSGKPLNNSKANSTEYRMLQRALALFGGEKERLTPYFRQMNLTGGNNPHPFLHETRWESHTNILSFYRSYLKARKAFLQSIGRSDRVENHRFLLLKEPKTDRQTLVAGWKGEFHLPRGIFTEAVRDCLIEMGLDEVGSYKEVGFMAKAVPLYFERACKDWVQPFYNYPFNVGNSLKPKKGRFLSKEKRAEEWESGKERFRLAKLKKEILEAKEHPYLDFKSWQKFERELRLVKNQDIITWMICGDLMEENKVEGLDTGTLYLKDIRTDVQEQGSLNVLNRVKPMRLPVVVYRADSRGHVHKEQAPLATVYIEERDTKLLKQGNFKSFVKDRRLNGLFSFVDTGALAMEQYPISKLRVEYELAKYQTARVCAFEQTLELEESLLTRCPHLPDKNFRKMLESWSDPLLDKWPDLHRKVRLLIAVRNAFSHNQYPMYDEAVFSSIRKYDPSFPDAIEERMGLNIAHRLSEEVKQAKETVERIIQA

SEQ ID NO: 620 - protein, 1119 aa, Porphyromonas gingivalis
MTEQNERPYNGTYYTLEDKHFWAAFFNLARHNAYITLAHIDRQLAYSKADITNDEDILFFKGQWKNLDNDLERKARLRSLILKHFSFLEGAAYGKKLFESQSSGNKSSKKKELTKKEKEELQANALSLDNLKSILFDFLQKLKDFRNYYSHYRHPESSELPLFDGNMLQRLYNVFDVSVQRVKRDHEHNDKVDPHRHFNHLVRKGKKDRYGNNDNPFFKHHFVDREEKVTEAGLLFFVSLFLEKRDAIWMQKKIRGFKGGTETYQQMTNEVFCRSRISLPKLKLESLRTDDWMLLDMLNELVRCPKSLYDRLREEDRARFRVPVDILSDEDDTDGTEEDPFKNTLVRHQDRFPYFALRYFDLKKVFTSLRFHIDLGTYHFAIYKKNIGEQPEDRHLTRNLYGFGRIQDFAEEHRPEEWKRLVRDLDYFETGDKPYITQTTPHYHIEKGKIGLRFVPEGQHLWPSPEVGATRTGRSKYAQDKRLTAEAFLSVHELMPMMFYYFLLREKYSDEASAERVQGRIKRVIEDVYAVYDAFARGEINTRDELDACLADKGIRRGHLPRQMIGILSQEHKDMEEKVRKKLQEMIVDTDHRLDMLDRQTDRKIRIGRKNAGLPKSGVIADWLVRDMMRFQPVAKDTSGKPLNNSKANSTEYRMLQRALALFGGEKERLTPYFRQMNLTGGNNPHPFLHETRWESHTNILSFYRSYLKARKAFLQSIGRSDRVENHRFLLLKEPKTDRQTLVAGWKGEFHLPRGIFTEAVRDCLIEMGLDEVGSYKEVGFMAKAVPLYFERACKDRVQPFYDYPFNVGNSLKPKKGRFLSKEKRAEEWESGKERFRLAKLKKEILEAKEHPYLDFKSWQKFERELRLVKNQDIITWMICRDLMEENKVEGLDTGTLYLKDIRTDVQEQGNLNVLNRVKPMRLPVVVYRADSRGHVHKEQAPLATVYIEERDTKLLKQGNFKSFVKDRRLNGLFSFVDTGALAMEQYPISKLRVEYELAKYQTARVCAFEQTLELEESLLTRYPHLPDKNFRKMLESWSDPLLDKWPDLHGNVRLLIAVRNAFSHNQYPMYDEAVFSSIRKYDPSSPDAIEERMGLNIAHRLSEEVKQAKEMAERIIQA

SEQ ID NO: 621 - protein, 1175 aa, Porphyromonas gingivalis
MTEQNEKPYNGTYYTLKDKHFWAAFFNLARHNAYITLTHIDRQLAYSKADITNDEDILFFKGQWKNLDNDLERKARLRSLILKHFSFLEGAAYGKKLFESQSSGNKSSKKKELTKKEKEELQANALSLDNLKSILFDFLQKLKDFRNYYSHYRHPESSELPMFDGNMLQRLYNVFDVSVQRVKRDHEHNDKVDPHRHFNHLVRKGKKDRCGNNDNPFFKHHFVDREGKVTEAGLLFFVSLFLEKRDAIWMQKKIRGFKGGTETYQQMTNEVFCRSRISLPKLKLESLRTDDWMLLDMLNELVRCPKSLYDRLREEDRACFRVPVDILSDEDDTDGAEEDPFKNTLVRHQDRFPYFALRYFDLKKVFTSLRFHIDLGTYHFAIYKKNIGEQPEDRHLTRNLYGFGRIQDFAEEHRPEEWKRLVRDLDCFETGDKPYITQTTPHYHIEKGKIGLRFVPEGQHLWPSPEVGATRTGRSKYAQDKRFTAEAFLSVHELMPMMFYYFLLREKYSEEVSAERVQGRIKRVIEDVYAVYDAFARDEINTRDELDACLADKGIRRGHLPRQMIAILSQKHKDMEEKVRKKLQEMIADTDHRLDMLDRQTDRKIRIGRKNAGLPKSGVIADWLVRDMMRFQPVAKDTSGKPLNNSKANSTEYRMLQRALALFGGEKERLTPYFRQMNLTGGNNPHPFLHETRWESHTNILSFYRSYLKARKAFLQSIGRSDRVENHRFLLLKEPKTDRQTLVAGWKGEFHLPRGIFTEAVRDCLIEMGLDEVGSYKEVGFMAKAVPLYFERACKDRVQPFYDYPFNVGNSLKPKKGRFLSKEKRAEEWESGKERFRDLEAWSHSAARRIEDAFAGIENASRENKKKIEQLLQDLSLWETFESKLKVKADKINIAKLKKEILEAKEHPYLDFKSWQKFERELRLVKNQDIITWMMCRDLMEENKVEGLDTGTLYLKDIRTDVQEQGSLNVLNHVKPMRLPVVVYRADSRGHVHKEQAPLATVYIEERDTKLLKQGNFKSFVKDRRLNGLFSFVDTGALAMEQYPISKLRVEYELAKYQTARVCAFEQTLELEESLLTRYPHLPDENFRKMLESWSDPLLDKWPDLHRKVRLLIAVRNAFSHNQYPMYDEAVFSSIRKYDPSSPDAIEERMGLNIAHRLSEEVKQAKEMAERIIQA

SEQ ID NO: 622 - protein, 1175 aa, Porphyromonas gingivalis
MTEQNEKPYNGTYYTLEDKHFWAAFFNLARHNAYITLTHIDRQLAYSKADITNDEDILFFKGQWKNLDNDLERKARLRSLILKHFSFLEGAAYGKKLFESQSSGNKSSKKKELTKKEKEELQANALSLDNLKSILFDFLQKLKDFRNYYSHYRHPESSELPLFDGNMLQRLYNVFDVSVQRVKRDHEHNDKVDPHRHFNHLVRKGKKDRCGNNDNPFFKHHFVDREEKVTEAGLLFFVSLFLEKRDAIWMQKKIRGFKGGTETYQQMTNEVFCRSRISLPKLKLESLRTDDWMLLDMLNELVRCPKSLYDRLREEDRARFRVPVDILSDEDDTDGTEEDPFKNTLVRHQDRFPYFALRYFDLKKVFTSLRFHIDLGTYHFAIYKKNIGEQPEDRHLTRNLYGFGRIQDFAEEHRPEEWKRLVRDLDYFETGDKPYITQTTPHYHIEKGKIGLRFVPEGQLLWPSPEVGATRTGRSKYAQDKRFTAEAFLSVHELMPMMFYYFLLREKYSEEASAERVQGRIKRVIEDVYAVYDAFARGEIDTLDRLDACLADKGIRRGHLPRQMIAILSQEHKDMEEKVRKKLQEMIADTDHRLDMLDRQTDRKIRIGRKNAGLPKSGVIADWLVRDMMRFQPVAKDTSGKPLNNSKANSTEYRMLQRALALFGGEKERLTPYFRQMNLTGGNNPHPFLHETRWESHTNILSFYRSYLKARKAFLQSIGRSDRVENHRFLLLKEPKTDRQTLVAGWKGEFHLPRGIFTEAVRDCLIEMGLDEVGSYKEVGFMAKAVPLYFERACKDRVQPFYDYPFNVGNSLKPKKGRFLSKEKRAEEWESGKERFRDLEAWSHSAARRIEDAFAGIENASRENKKKIEQLLQDLSLWETFESKLKVKADKINIAKLKKEILEAKEHPYLDFKSWQKFERELRLVKNQDIITWMMCRDLMEENKVEGLDTGTLYLKDIRTDVHEQGSLNVLNRVKPMRLPVVVYRADSRGHVHKEQAPLATVYIEERDTKLLKQGNFKSFVKDRRLNGLFSFVDTGALAMEQYPISKLRVEYELAKYQTARVCAFEQTLELEESLLTRYPHLPDKNFRKMLESWSDPLLDKWPDLHGNVRLLIAVRNAFSHNQYPMYDETLFSSIRKYDPSSPDAIEERMGLNIAHRLSEEVKQAKEMVERIIQA

SEQ ID NO: 623 - protein, 1175 aa, Porphyromonas gingivalis
MTEQNEKPYNGTYYTLEDKHFWAAFFNLARHNAYITLAHIDRQLAYSKADITNDEDILFFKGQWKNLDNDLERKARLRSLILKHFSFLEGAAYGKKLFESQSSGNKSSKKKELTKKEKEELQANALSLDNLKSILFDFLQKLKDFRNYYSHYRHPESSELPLFDGNMLQRLYNVFDVSVQRVKRDHEHNDKVDPHRHFNHLVRKGKKDKYGNNDNPFFKHHFVDREEKVTEAGLLFFVSLFLEKRDAIWMQKKIRGFKGGTEAYQQMTNEVFCRSRISLPKLKLESLRTDDWMLLDMLNELVRCPKSLYDRLREEDRARFRVPVDILSDEDDTDGTEEDPFKNTLVRHQDRFPYFALRYFDLKKVFTSLRFHIDLGTYHFAIYKKNIGEQPEDRHLTRNLYGFGRIQDFAEEHRPEEWKRLVRDLDYFETGDKPYITQTTPHYHIEKGKIGLRFVPEGQLLWPSPEVGATRTGRSKYAQDKRFTAEAFLSVHELMPMMFYYFLLREKYSEEASAEKVQGRIKRVIEDVYAVYDAFARDEINTRDELDACLADKGIRRGHLPRQMIAILSQEHKDMEEKVRKKLQEMIADTDHRLDMLDRQTDRKIRIGRKNAGLPKSGVIADWLVRDMMRFQPVAKDTSGKPLNNSKANSTEYRMLQRALALFGGEKERLTPYFRQMNLTGGNNPHPFLHETRWESHTNILSFYRSYLKARKAFLQSIGRSDREENHRFLLLKEPKTDRQTLVAGWKSEFHLPRGIFTEAVRDCLIEMGYDEVGSYKEVGFMAKAVPLYFERACKDRVQPFYDYPFNVGNSLKPKKGRFLSKEKRAEEWESGKERFRDLEAWSHSAARRIEDAFVGIEYASWENKKKIEQLLQDLSLWETFESKLKVKADKINIAKLKKEILEAKEHPYHDFKSWQKFERELRLVKNQDIITWMMCRDLMEENKVEGLDTGTLYLKDIRTDVQEQGSLNVLNHVKPMRLPVVVYRADSRGHVHKEEAPLATVYIEERDTKLLKQGNFKSFVKDRRLNGLFSFVDTGALAMEQYPISKLRVEYELAKYQTARVCAFEQTLELEESLLTRYPHLPDESFREMLESWSDPLLDKWPDLQREVRLLIAVRNAFSHNQYPMYDETIFSSIRKYDPSSLDAIEERMGLNIAHRLSEEVKLAKEMVERIIQA

SEQ ID NO: 624 - protein, 1175 aa, Porphyromonas gingivalis
MTEQNEKPYNGTYYTLEDKHFWAAFFNLARHNAYITLAHIDRQLAYSKADITNDEDILFFKGQWKNLDNDLERKARLRSLILKHFSFLEGAAYGKKLFESQSSGNKSSKKKELTKKEKEELQANALSLDNLKSILFDFLQKLKDFRNYYSHYRHPESSELPLFDGNMLQRLYNVFDVSVQRVKRDHEHNDKVDPHRHFNHLVRKGKKDKYGNNDNPFFKHHFVDREEKVTEAGLLFFVSLFLEKRDAIWMQKKIRGFKGGTEAYQQMTNEVFCRSRISLPKLKLESLRTDDWMLLDMLNELVRCPKLLYDRLREEDRARFRVPVDILSDEDDTDGTEEDPFKNTLVRHQDRFPYFALRYFDLKKVFTSLRFHIDLGTYHFAIYKKNIGEQPEDRHLTRNLYGFGRIQDFAEEHRPEEWKRLVRDLDYFETGDKPYITQTTPHYHIEKGKIGLRFVPEGQLLWPSPEVGATRTGRSKYAQDKRFTAEAFLSVHELMPMMFYYFLLREKYSEEASAEKVQGRIKRVIEDVYAVYDAFARDEINTRDELDACLADKGIRRGHLPRQMIAILSQEHKDMEEKVRKKLQEMIADTDHRLDMLDRQTDRKIRIGRKNAGLPKSGVIADWLVRDMMRFQPVAKDTSGKPLNNSKANSTEYRMLQRALALFGGEKERLTPYFRQMNLTGGNNPHPFLHETRWESHTNILSFYRSYLKARKAFLQSIGRSDREENHRFLLLKEPKTDRQTLVAGWKSEFHLPRGIFTEAVRDCLIEMGYDEVGSYKEVGFMAKAVPLYFERACKDRVQPFYDYPFNVGNSLKPKKGRFLSKEKRAEEWESGKERFRDLEAWSHSAARRIEDAFVGIEYASWENKKKIEQLLQDLSLWETFESKLKVKADKINIAKLKKEILEAKEHPYHDFKSWQKFERELRLVKNQDIITWMMCRDLMEENKVEGLDTGTLYLKDIRTDVQEQGSLNVLNHVKPMRLPVVVYRADSRGHVHKEEAPLATVYIEERDTKLLKQGNFKSFVKDRRLNGLFSFVDTGALAMEQYPISKLRVEYELAKYQTARVCAFEQTLELEESLLTRYPHLPDESFREMLESWSDPLLDKWPDLQREVRLLIAVRNAFSHNQYPMYDETIFSSIRKYDPSSLDAIEERMGLNIAHRLSEEVKLAKEMVERIIQA

SEQ ID NO: 625 - protein, 1119 aa, Porphyromonas gingivalis; identical to SEQ ID NO: 164

SEQ ID NO: 626 - protein, 1119 aa, Porphyromonas gingivalis
MTEQNERPYNGTYYTLEDKHFWAAFFNLARHNAYITLAHIDRQLAYSKADITNDEDILFFKGQWKNLDNDLERKARLRSLILKHFSFLEGAAYGKKLFESQSSGNKSSKKKELTKKEKEELQANALSLDNLKSILFDFLQKLKDFRNYYSHYRHPESSELPLFDGNMLQRLYNVFDVSVQRVKRDHEHNDKVDPHRHFNHLVRKGKKDRYGNNDNPFFKHHFVDREGTVTEAGLLFFVSLFLEKRDAIWMQKKIRGFKGGTEAYQQMTNEVFCRSRISLPKLKLESLRTDDWMLLDMLNELVRCPKSLYDRLREEDRARFRVPIDILSDEDDTDGTEEDPFKNTLVRHQDRFPYFALRYFDLKKVFTSLRFHIDLGTYHFAIYKKNIGEQPEDRHLTRNLYGFGRIQDFAEEHRPEEWKRLVRDLDYFETGDKPYITQTTPHYHIEKGKIGLRFVPEGQHLWPSPEVGATRTGRSKYAQDKRLTAEAFLSVHELMPMMFYYFLLREKYSEEVSAEKVQGRIKRVIEDVYAVYDAFARGEIDTLDRLDACLADKGIRRGHLPRQMIAILSQEHKDMEEKVRKKLQEMIADTDHRLDMLDRQTDRKIRIGRKNAGLPKSGVIADWLVRDMMRFQPVAKDTSGKPLNNSKANSTEYRMLQRALALFGGEKERLTPYFRQMNLTGGNNPHPFLHETRWESHTNILSFYRSYLKARKAFLQSIGRSDREENHRFLLLKEPKTDRQTLVAGWKSEFHLPRGIFTEAVRDCLIEMGYDEVGSYKEVGFMAKAVPLYFERACKDRVQPFYDYPFNVGNSLKPKKGRFLSKEKRAEEWESGKERFRLAKLKKEILEAKEHPYLDFKSWQKFERELRLVKNQDIITWMMCRDLMEENKVEGLDTGTLYLKDIRTDVHEQGSLNVLNRVKPMRLPVVVYRADSRGHVHKEQAPLATVYIEERDTKLLKQGNFKSFVKDRRLNGLFSFVDTGALAMEQYPISKLRVEYELAKYQTARVCAFEQTLELEESLLTRYPHLPDKNFRKMLESWSDPLLDKWPDLHRKVRLLIAVRNAFSHNQYPMYDEAVFSSIRKYDPSSPDAIEERMGLNIAHRLSEEVKQAKEMAERIIQV

SEQ ID NO: 627 - protein, 1119 aa, Porphyromonas gingivalis
MTEQNERPYNGTYYTLEDKHFWAAFFNLARHNAYITLTHIDRQLAYSKADITNDEDILFFKGQWKNLDNDLERKARLRSLILKHFSFLEGAAYGKKLFENKSSGNKSSKKKELTKKEKEELQANALSLDNLKSILFDFLQKLKDFRNYYSHYRHPESSELPLFDGNMLQRLYNVFDVSVQRVKRDHEHNDKVDPHRHFNHLVRKGKKDRCGNNDNPFFKHHFVDREGKVTEAGLLFFVSLFLEKRDAIWMQKKIRGFKGGTEAYQQMTNEVFCRSRISLPKLKLESLRTDDWMLLDMLNELVRCPKSLYDRLREEDRARFRVPVDILSDEDDTDGTEEDPFKNTLVRHQDRFPYFALRYFDLKKVFTSLRFHIDLGTYHFAIYKKNIGEQPEDRHLTRNLYGFGRIQDFAEEHRPEEWKRLVRDLDYFETGDKPYITQTTPHYHIEKGKIGLRFVPEGQHLWPSPEVGATRTGRSKYAQDKRLTAEAFLSVHELMPMMFYYFLLREKYSEEVSAEKVQGRIKRVIEDVYAVYDAFARGEIDTLDRLDACLADKGIRRGHLPRQMIAILSQEHKDMEEKVRKKLQEMIADTDHRLDMLDRQTDRKIRIGRKNAGLPKSGVIADWLVRDMMRFQPVAKDTSGKPLNNSKANSTEYRMLQRALALFGGEKERLTPYFRQMNLTGGNNPHPFLHETRWESHTNILSFYRSYLKARKAFLQSIGRSDREENHRFLLLKEPKTDRQTLVAGWKSEFHLPRGIFTEAVRDCLIEMGYDEVGSYKEVGFMAKAVPLYFERACKDRVQPFYDYPFNVGNSLKPKKGRFLSKEKRAEEWESGKERFRLAKLKKEILEAKEHPYLDFKSWQKFERELRLVKNQDIITWMMCRDLMEENKVEGLDTGTLYLKDIRTEVQEQGSLNVLNRVKPMRLPVVVYRADSRGHVHKEQAPLATVYIEERDTKLLKQGNFKSFVKDRRLNGLFSFVDTGGLAMEQYPISKLRVEYELAKYQTARVCAFEQTLELEESLLTRCPHLPDKNFRKMLESWSDPLLDKWPDLQREVWLLIAVRNAFSHNQYPMYDEAVFSSIRKYDPSSPDAIEERMGLNIAHRLSEEVKQAKEMAERIIQA

SEQ ID NO: 628 - protein, 1161 aa, Bacteroidetes bacterium GWA2_31_9
MENQTQKGKGIYYYYTKNEDKHYFGSFLNLANNNIEQIIEEFRIRLSLKDEKNIKEIINNYFTDKKSYTDWERGINILKEYLPVIDYLDLAITDKEFEKIDLKQKETAKRKYFRTNFSLLIDTIIDLRNFYTHYFHKPISINPDVAKFLDKNLLNVCLDIKKQKMKTDKTKQALKDGLDKELKKLIELKKAELKEKKIKTWNITENVEGAVYNDAFNHMVYKNNAGVTILKDYHKSILPDDKIDSELKLNFSISGLVFLLSMFLSKKEIEQFKSNLEGFKGKVIGENGEYEISKFNNSLKYMATHWIFSYLTFKGLKQRVKNTFDKETLLMQMIDELNKVPHEVYQTLSKEQQNEFLEDINEYVQDNEENKKSMENSIVVHPVIRKRYDDKFNYFAIRFLDEFANFPTLKFFVTAGNFVHDKREKQIQGSMLTSDRMIKEKINVFGKLTEIAKYKSDYFSNENTLETSEWELFPNPSYLLIQNNIPVHIDLIHNTEEAKQCQIAIDRIKCTTNPAKKRNTRKSKEEIIKIIYQKNKNIKYGDPTALLSSNELPALIYELLVNKKSGKELENIIVEKIVNQYKTIAGFEKGQNLSNSLITKKLKKSEPNEDKINAEKIILAINRELEITENKLNIIKNNRAEFRTGAKRKHIFYSKELGQEATWIAYDLKRFMPEASRKEWKGFHHSELQKFLAFYDRNKNDAKALLNMFWNFDNDQLIGNDLNSAFREFHFDKFYEKYLIKRDEILEGFKSFISNFKDEPKLLKKGIKDIYRVFDKRYYIIKSTNAQKEQLLSKPICLPRGIFDNKPTYIEGVKVESNSALFADWYQYTYSDKHEFQSFYDMPRDYKEQFEKFELNNIKSIQNKKNLNKSDKFIYFRYKQDLKIKQIKSQDLFIKLMVDELFNVVFKNNIELNLKKLYQTSDERFKNQLIADVQKNREKGDTSDNKMNENFIWNMTIPLSLCNGQIEEPKVKLKDIGKFRKLETDDKVIQLLEYDKSKVWKKLEIEDELENMPNSYERIRREKLLKGIQEFEHFLLEKEKFDGINHPKHFEQDLNPNFKTYVINGVLRKNSKLNYTEIDKLLDLEHISIKDIETSAKEIHLAYFLIHVRNKFGHNQLPKLEAFELMKKYYKKNNEETYAEYFHKVSSQIVNEFKNSLEKHS

SEQ ID NO: 629 - protein, 1165 aa, Chryseobacterium jejuense
MEKTQTGLGIYYDHTKLQDKYFFGGFFNLAQNNIDNVIKAFIIKFFPERKDKDINIAQFLDICFKDNDADSDFQKKNKFLRIHFPVIGFLTSDNDKAGFKKKFALLLKTISELRNFYTHYYHKSIEFPSELFELLDDIFVKTTSEIKKLKKKDDKTQQLLNKNLSEEYDIRYQQQIERLKELKAQGKRVSLTDETAIRNGVFNAAFNHLIYRDGENVKPSRLYQSSYSEPDPAENGISLSQNSILFLLSMFLERKETEDLKSRVKGFKAKIIKQGEEQISGLKFMATHWVFSYLCFKGIKQKLSTEFHEETLLIQIIDELSKVPDEVYSAFDSKTKEKFLEDINEYMKEGNADLSLEDSKVIHPVIRKRYENKFNYFAIRFLDEYLSSTSLKFQVHVGNYVHDRRVKHINGTGFQTERIVKDRIKVFGRLSNISNLKADYIKEQLELPNDSNGWEIFPNPSYIFIDNNVPIHVLADEATKKGIELFKDKRRKEQPEELQKRKGKISKYNIVSMIYKEAKGKDKLRIDEPLALLSLNEIPALLYQILEKGATPKDIELIIKNKLTERFEKIKNYDPETPAPASQISKRLRNNTTAKGQEALNAEKLSLLIEREIENTETKLSSIEEKRLKAKKEQRRNTPQRSIFSNSDLGRIAAWLADDIKRFMPAEQRKNWKGYQHSQLQQSLAYFEKRPQEAFLLLKEGWDTSDGSSYWNNWVMNSFLENNHFEKFYKNYLMKRVKYFSELAGNIKQHTHNTKFLRKFIKQQMPADLFPKRHYILKDLETEKNKVLSKPLVFSRGLFDNNPTFIKGVKVTENPELFAEWYSYGYKTEHVFQHFYGWERDYNELLDSELQKGNSFAKNSIYYNRESQLDLIKLKQDLKIKKIKIQDLFLKRIAEKLFENVFNYPTTLSLDEFYLTQEERAEKERIALAQSLREEGDNSPNIIKDDFIWSKTIAFRSKQIYEPAIKLKDIGKFNRFVLDDEESKASKLLSYDKNKIWNKEQLERELSIGENSYEVIRREKLFKEIQNLELQILSNWSWDGINHPREFEMEDQKNTRHPNFKMYLVNGILRKNINLYKEDEDFWLESLKENDFKTLPSEVLETKSEMVQLLFLVILIRNQFAHNQLPEIQFYNFIRKNYPEIQNNTVAELYLNLIKLAVQKLKDNS

SEQ ID NO: 630 - protein, 1156 aa, Chryseobacterium carnipullorum
MNTRVTGMGVSYDHTKKEDKHFFGGFLNLAQDNITAVIKAFCIKFDKNPMSSVQFAESCFTDKDSDTDFQNKVRYVRTHLPVIGYLNYGGDRNTFRQKLSTLLKAVDSLRNFYTHYYHSPLALSTELFELLDTVFASVAVEVKQHKMKDDKTRQLLSKSLAEELDIRYKQQLERLKELKEQGKNIDLRDEAGIRNGVLNAAFNHLIYKEGEIAKPTLSYSSFYYGADSAENGITISQSGLLFLLSMFLGKKEIEDLKSRIRGFKAKIVRDGEENISGLKFMATHWIFSYLSFKGMKQRLSTDFHEETLLIQIIDELSKVPDEVYHDFDTATREKFVEDINEYIREGNEDFSLGDSTIIHPVIRKRYENKFNYFAVRFLDEFIKFPSLRFQVHLGNFVHDRRIKDIHGTGFQTERVVKDRIKVFGKLSEISSLKTEYIEKELDLDSDTGWEIFPNPSYVFIDNNIPIYISTNKTFKNGSSEFIKLRRKEKPEEMKMRGEDKKEKRDIASMIGNAGSLNSKTPLAMLSLNEMPALLYEILVKKTTPEEIELIIKEKLDSHFENIKNYDPEKPLPASQISKRLRNNTTDKGKKVINPEKLIHLINKEIDATEAKFALLAKNRKELKEKFRGKPLRQTIFSNMELGREATWLADDIKRFMPDILRKNWKGYQHNQLQQSLAFFNSRPKEAFTILQDGWDFADGSSFWNGWIINSFVKNRSFEYFYEAYFEGRKEYFSSLAENIKQHTSNHRNLRRFIDQQMPKGLFENRHYLLENLETEKNKILSKPLVFPRGLFDTKPTFIKGIKVDEQPELFAEWYQYGYSTEHVFQNFYGWERDYNDLLESELEKDNDFSKNSIHYSRTSQLELIKLKQDLKIKKIKIQDLFLKLIAGHIFENIFKYPASFSLDELYLTQEERLNKEQEALIQSQRKEGDHSDNIIKDNFIGSKTVTYESKQISEPNVKLKDIGKFNRFLLDDKVKTLLSYNEDKVWNKNDLDLELSIGENSYEVIRREKLFKKIQNFELQTLTDWPWNGTDHPEEFGTTDNKGVNHPNFKMYVVNGILRKHTDWFKEGEDNWLENLNETHFKNLSFQELETKSKSIQTAFLIIMIRNQFAHNQLPAVQFFEFIQKKYPEIQGSTTSELYLNFINLAVVELLELLEK

SEQ ID NO: 631 - protein, 1036 aa, Chryseobacterium ureilyticum
METQILGNGISYDHTKTEDKHFFGGFLNTAQNNIDLLIKAYISKFESSPRKLNSVQFPDVCFKKNDSDADFQHKLQFIRKHLPVIQYLKYGGNREVLKEKFRLLLQAVDSLRNFYTHFYHKPIQLPNELLTLLDTIFGEIGNEVRQNKMKDDKTRHLLKKNLSEELDFRYQEQLERLRKLKSEGKKVDLRDTEAIRNGVLNAAFNHLIFKDAEDFKPTVSYSSYYYDSDTAENGISISQSGLLFLLSMFLGRREMEDLKSRVRGFKARIIKHEEQHVSGLKFMATHWVFSEFCFKGIKTRLNADYHEETLLIQLIDELSKVPDELYRSFDVATRERFIEDINEYIRDGKEDKSLIESKIVHPVIRKRYESKFNYFAIRFLDEFVNFPTLRFQVHAGNYVHDRRIKSIEGTGFKTERLVKDRIKVFGKLSTISSLKAEYLAKAVNITDDTGWELLPHPSYVFIDNNIPIHLTVDPSFKNGVKEYQEKRKLQKPEEMKNRQGGDKMHKPAISSKIGKSKDINPESPVALLSMNEIPALLYEILVKKASPEEVEAKIRQKLTAVFERIRDYDPKVPLPASQVSKRLRNNTDTLSYNKEKLVELANKEVEQTERKLALITKNRRECREKVKGKFKRQKVFKNAELGTEATWLANDIKRFMPEEQKKNWKGYQHSQLQQSLAFFESRPGEARSLLQAGWDFSDGSSFWNGWVMNSFARDNTFDGFYESYLNGRMKYFLRLADNIAQQSSTNKLISNFIKQQMPKGLFDRRLYMLEDLATEKNKILSKPLIFPRGIFDDKPTFKKGVQVSEEPEAFADWYSYGYDVKHKFQEFYAWDRDYEELLREELEKDTAFTKNSIHYSRESQIELLAKKQDLKVKKVRIQDLYLKLMAEFLFENVFGHELALPLDQFYLTQEERLKQEQEAIVQSQRPKGDDSPNIVKENFIWSKTIPFKSGRVFEPNVKLKDIGKFRNLLTDEKVDILLSYNNTEIGKQVIENELIIGAGSYEFIRREQLFKEIQQMKRLSLRSVRGMGVPIRLNLK

SEQ ID NO: 632 - protein, 1149 aa, Sinomicrobium oceani
MESTTTLGLHLKYQHDLFEDKHYFGGGVNLAVQNIESIFQAFAERYGIQNPLRKNGVPAINNIFHDNISISNYKEYLKFLKQYLPVVGFLEKSNEINIFEFREDFEILINAIYKLRHFYTHYYHSPIKLEDRFYTCLNELFVAVAIQVKKHKMKSDKTRQLLNKNLHQLLQQLIEQKREKLKDKKAEGEKVSLDTKSIENAVLNDAFVHLLDKDENIRLNYSSRLSEDIITKNGITLSISGLLFLLSLFLQRKEAEDLRSRIEGFKGKGNELRFMATHWVFSYLNVKRIKHRLNTDFQKETLLIQIADELSKVPDEVYKTLDHENRSKFLEDINEYIREGNEDASLNESTVVHGVIRKRYENKFHYLVLRYLDEFVDFPSLRFQVHLGNYIHDRRDKVIDGTNFITNRVIKEPIKVFGKLSHVSKLKSDYMESLSREHKNGWDVFPNPSYNFVGHNIPIFINLRSASSKGKELYRDLMKIKSEKKKKSREEGIPMERRDGKPTKIEISNQIDRNIKDNNFKDIYPGEPLAMLSLNELPALLFELLRRPSITPQDIEDRMVEKLYERFQIIRDYKPGDGLSTSKISKKLRKADNSTRLDGKKLLRAIQTETRNAREKLHTLEENKALQKNRKRRTVYTTREQGREASWLAQDLKRFMPIASRKEWRGYHHSQLQQILAFYDQNPKQPLELLEQFWDLKEDTYVWNSWIHKSLSQHNGFVPMYEGYLKGRLGYYKKLESDIIGFLEEHKVLKRYYTQQHLNVIFRERLYFIKTETKQKLELLARPLVFPRGIFDDKPTFVQDKKVVDHPELFADWYVYSYKDDHSFQEFYHYKRDYNEIFETELSWDIDFKDNKRQLNPSEQMDLFRMKWDLKIKKIKIQDIFLKIVAEDIYLKIFGHKIPLSLSDFYISRQERLTLDEQAVAQSMRLPGDTSENQIKESNLWQTTVPYEKEQIREPKIKLKDIGKFKYFLQQQKVLNLLKYDPQHVWTKAELEEELYIGKHSYEVVRREMLLQKCHQLEKHILEQFRFDGSNHPRELEQGNHPNFKMYIVNGILTKRGELEIEAENWWLELGNSKNSLDKVEVELLTMKTIPEQKAFLLILIRNKFAHNQLPADNYFHYASNLMNLKKSDTYSLFWFTVADTIVQEFMSL

SEQ ID NO: 633 - protein, 1133 aa, Reichenbachiella agariperforans
MKTNPLIASSGEKPNYKKFNTESDKSFKKIFQNKGSIAPIAEKACKNFEIKSKSPVNRDGRLHYFSVGHAFKNIDSKNVFRYELDESQMDMKPTQFLALQKEFFDFQGALNGLLKHIRNVNSHYVHTFEKLEIQSINQKLITFLIEAFELAVIHSYLNEEELSYEAYKDDPQSGQKLVQFLCDKFYPNKEHEVEERKTILAKNKRQALEHLLFIEVTSDIDWKLFEKHKVFTISNGKYLSFHACLFLLSLFLYKSEANQLISKIKGFKRNDDNQYRSKRQIFTFFSKKFTSQDVNSEEQHLVKFRDVIQYLNHYPSAWNKHLELKSGYPQMTDKLMRYIVEAEIYRSFPDQTDNHRFLLFAIREFFGQSCLDTWTGNTPINFSNQEQKGFSYEINTSAEIKDIETKLKALVLKGPLNFKEKKEQNRLEKDLRREKKEQPTNRVKEKLLTRIQHNMLYVSYGRNQDRFMDFAARFLAETDYFGKDAKFKMYQFYTSDEQRDHLKEQKKELPKKEFEKLKYHQSKLVDYFTYAEQQARYPDWDTPFVVENNAIQIKVTLFNGAKKIVSVQRNLMLYLLEDALYSEKRENAGKGLISGYFVHHQKELKDQLDILEKETEISREQKREFKKLLPKRLLHRYSPAQINDTTEWNPMEVILEEAKAQEQRYQLLLEKAILHQTEEDFLKRNKGKQFKLRFVRKAWHLMYLKELYMNKVAEHGHHKSFHITKEEFNDFCRWMFAFDEVPKYKEYLCDYFSQKGFFNNAEFKDLIESSTSLNDLYEKTKQRFEGWSKDLTKQSDENKYLLANYESMLKDDMLYVNISHFISYLESKGKINRNAHGHIAYKALNNVPHLIEEYYYKDRLAPEEYKSHGKLYNKLKTVKLEDALLYEMAMHYLSLEPALVPKVKTKVKDILSSNIAFDIKDAAGHHLYHLLIPFHKIDSFVALINHQSQQEKDPDKTSFLAKIQPYLEKVKNSKDLKAVYHYYKDTPHTLRYEDLNMIHSHIVSQSVQFTKVALKLEEYFIAKKSITLQIARQISYSEIADLSNYFTDEVRNTAFHFDVPETAYSMILQGIESEFLDREIKPQKPKSLSELSTQQVSVCTAFLETLHNNLFDRKDDKKERLSKARERYFEQIN
